(19) United States
(12) Patent Application Publication
(10) Pub. No.: US 2025/0000968 A1
(43) Pub. Date: Jan. 2, 2025

(54) SARS-COV-2 SPIKE FUSED TO A HEPATITIS B SURFACE ANTIGEN

(71) Applicant: The United States of America, as represented by the Secretary,Department of Health and Human Service, Bethesda, MD (US)

(72) Inventors: John Mascola, Rockville, MD (US); Cuiping Liu, North Potomac, MD (US); Wei Shi, Rockville, MD (US); Amarendra Pegu, Rockville, MD (US); Lingshu Wang, North Potomac, MD (US); Wing-Pui Kong, Germantown, MD (US)

(73) Assignee: The United States of America, as represented by the Secretary,Department of Health and Human Service, Bethesda, MD (US)

(21) Appl. No.: 18/709,441

(22) PCT Filed: Nov. 11, 2022
(86) PCT No.: PCT/US2022/079750

§ 371 Date: May 10, 2024

Related U.S. Application Data
(60) Provisional application No. 63/278,956, filed on Nov. 12, 2021.

(51) Int. Cl. A61K 39/215; A61K 39/00; A61P 31/14; C07K 14/005

(52) U.S. Cl. CPC A61K 39/215; A61P 31/14; C07K 14/005; A61K 2039/5258; A61K 2039/53; A61K 2039/55; A61K 2039/55555; A61K 2039/575; C07K 2319/735; C12N 2730/10134; C12N 2770/20034

(57) ABSTRACT

Provided herein are nucleic acid molecules encoding a SARS-CoV-2 S ectodomain—HBsAg fusion protein. When expressed in mammalian cells (for example, by administration to a mammalian subject), the fusion protein self-assembles to form a HBsAg protein nanoparticle with SARS-CoV-2 S ectodomain trimers extending radially outward from an outer surface of the HBsAg protein nanoparticle. Thus, in several aspects, the disclosed nucleic acid molecule can be used to generate an immune response to SARS-CoV-2 in a subject.

### CROSS REFERENCE TO RELATED APPLICATION

[0001] This application claims priority to U.S. Provisional Application No. 63/278,956, filed Nov. 12, 2021, which is incorporated by reference in its entirety.

### FIELD

[0002] This disclosure concerns fusion proteins comprising a SARS-CoV-2 S ectodomain fused to a Hepatitis B Surface Antigen (HBsAg), nucleic acid molecules encoding the fusion proteins, and their use for eliciting an immune response to SARS-CoV-2.

### BACKGROUND

[0003] Coronaviruses are enveloped, positive-sense single-stranded RNA viruses. They have the large genomes (26-32 kb) and are phylogenetically divided into four genera (α, β, γ, δ), with betacoronaviruses further subdivided into four lineages (A, B, C, D). Coronaviruses infect a wide range of avian and mammalian species, including humans.

[0004] In 2019, a novel coronavirus (later designated SARS-CoV-2 by the World Health Organization) was identified as the causative agent of an outbreak of pneumonia that was later termed COVID-19. As of August 2021, SARS-CoV-2 had infected more than 200 million people worldwide, leading to more than 4 million deaths. Although multiple SARS-CoV-2 vaccines have been fully approved or granted emergency use authorization, a need exists for additional SARS-CoV-2 vaccines that elicit a superior and longer-lasting immune response.

### SUMMARY

[0005] Disclosed herein are nucleic acid molecules encoding a fusion protein comprising a recombinant SARS-CoV-2 S ectodomain fused via a peptide linker to a HBsAg protein. In some aspects, provided is a nucleic acid molecule encoding a fusion protein comprising a recombinant SARS-CoV-2 spike(S) ectodomain comprising F817P, A892P, A899P, A942P, K986P, and V987P substitutions (according to the reference SARS-CoV-2 S protein set forth as SEQ ID NO: 1) and an amino acid sequence at least 90% identical to residues 14-1206 of SEQ ID NO: 2 fused via a peptide linker to a HBsAg protein. In some aspects, a S1/S2 protease cleavage site of the SARS-CoV-2 S ectodomain is mutated to inhibit protease cleavage. When expressed in mammalian cells (for example, by administration to a mammalian subject), the fusion protein self-assembles to form a HBsAg nanoparticle with SARS-CoV-2 S ectodomain trimers extending radially outward from an outer surface of the HBsAg nanoparticle.

[0006] In some aspects, the fusion protein comprises a SARS-CoV-2 ectodomain with the F817P, A892P, A899P, A942P, K986P, V987P substitutions, and the RRAR (682-685)-to-GSAS substitution according to the reference SARS-CoV-2 S protein set forth as SEQ ID NO: 1, and the fusion protein comprises an amino acid sequence at least 90% identical (such as at least 95% identical, at least 99% identical, or identical) to residues 14 to the C-terminus of any one of SEQ ID NOs: 10-12, 17-18, 57-296, or 315-321.

[0007] In additional aspects, a nucleic acid molecule is provided that encodes a fusion protein comprising a recombinant Coronavirus S ectodomain fused via a peptide linker to a HBsAg protein. When expressed in mammalian cells (for example, by administration to a mammalian subject), the fusion protein self-assembles to form a HBsAg nanoparticle with trimers of the Coronavirus S ectodomain extending radially outward from an outer surface of the HBsAg nanoparticle.

[0008] The nucleic acid molecule can be any suitable nucleic acid molecule for expression in mammalian cells, such as DNA or RNA, including mRNA, modified mRNA, circular RNA, modified circular RNA, and replication competent RNA with or without modified bases. The nucleic acid molecule can be included in a vector, such as an expression vector.

[0009] Additionally provided is a HBsAg nanoparticle encoded by the nucleic acid or vector as described herein, and comprising Coronavirus S ectodomain trimers extending radially outward from an outer surface of the nanoparticle.

[0010] Further provided are immunogenic compositions that include the nucleic acid molecule encoding the fusion protein, vector, or HBsAg nanoparticle, and a pharmaceutically acceptable carrier.

[0011] Also provided are methods of eliciting an immune response against Coronavirus (e.g., SARS-CoV-2) in a subject and methods of immunizing a subject against Coronavirus (e.g., SARS-CoV-2) infection by administering to the subject an effective amount of the nucleic acid molecule encoding the fusion protein, vector, or HBsAg nanoparticle, disclosed herein.

[0012] The foregoing and other objects and features of the disclosure will become more apparent from the following detailed description, which proceeds with reference to the accompanying figures.

### BRIEF DESCRIPTION OF THE DRAWINGS

[0013] FIGS. 1A-1D. Self-assembling SARS-CoV-2 S6P—HBsAg nanoparticles. (1A) Schematic representation of full-length SARS-CoV-2 WA1 spike, S2P (1-1273), S2P (1-1206), S6P (1-1206) and S6P—HBsAg fusion protein. The individual domain of the spike or its ectodomains was colored and indicated. S2P (1-1273) is full-length spike harboring K986P, V987P mutations and RRAR-to-GSAS substitution at the furin cleavage site. S2P (1-1206) and S6P (1-1206) represent the ectodomains of S2P and S6P spanning from amino acids 1 to 1206, respectively. S6P (1-1206) contains six proline substitutions: F817P, A892P, A899P, A942P, K986P and V987P. Both S2P (1-1206) and S6P (1-1206) contain GSAS substitution at the furin cleavage site. S6P—HBsAg fusion was constructed by joining S6P (1-1206) and HBsAg from amino acid 1 to 226 with a linker of GS repeats. (1B) Constructs tested for nanoparticle formation on a HBsAg core. The spike-HBsAg constructs for SARS-CoV-2 WA1 spike, S2P and S6P with a 12-GS linker were named S-12-HBsAg, S2P-12-HBsAg and S6P-12-HBsAg, respectively. Varying linkers of 8- to 24-GS were tested and named accordingly. (1C) Negative stain EM images of S6P-8-HBsAg (left), S6P-12-HBsAg (middle) and S6P-16-HBsAg (right) from the 50% sucrose fractions. The insets show 2D class averages of corresponding nanoparticle constructs. Scale bars represent 100 nm in micrographs and 20 nm in 2D class average images. (1D) Human ACE2 binding and antigenicity of S6P—HBsAgs. Plates were coated with 1 μg/ml of SARS-CoV-2 S2P, S6P or S6P—HBsAg nanoparticles. Human ACE2 was assessed at a concentration ranging from 6.1 ng/ml to 100 μg/ml. The mAbs specific to the NTD, SD1, S2 or RBD domain of SARS-CoV-2 spike were tested from 1 μg/ml to 4 μg/ml.

[0014] FIGS. 2A-2B. Neutralization potency elicited by SARS-CoV-2 S6P—HBsAgs. (2A) Immunization schema of SARS-CoV-2 DNA constructs. SARS-CoV-2 WA1 S2P (1-1206), S6P (1-1206), S6P-12-HBsAg, S6P-16-HBsAg and S2P (1-1273) DNA matching mRNA-1273 sequence were evaluated. A total of 10, 2 or 0.4 μg of each DNA was injected intramuscularly to two hind legs of BALB/cJ mice at week 0 and 4, excepting S2P (1-1273), which was administer at week 0 and 3. Electroporation was applied following each immunization. Sera were collected 2 weeks post each immunization and followed by a 5- to 10-week interval for mice immunized with S2P (1-1206), S6P (1-1206), S6P-12-HBsAg or S6P-16-HBsAg. (2B) Neutralization ID50s against WA1 pseudovirus. The sera at 2 weeks post the second immunization were assessed. The ID50s were plotted in the box and whiskers format, in which, the median ID50 was indicated by a horizontal line, and the data points in the median quartile of each group were boxed. The error bars represent 95% confidence interval. The immunogens and doses were indicated. The neutralization ID50s were plotted in a logarithmic scale as dots, diamonds and triangles for 10, 2 and 0.4 μg doses, respectively. The geometric mean titers were listed below each group. The statistical analyses were performed using the two-way ANOVA test for S2P (1-1206), S6P (1-1206), S6P-12-HBsAg and S6P-16-HBsAg. The comparison between the same dose of S6P—HBsAg and S2P (1-1273) was done using the two tailed Mann-Whitney test with Dunn's multiple comparisons test. *p<0.05; **p<0.01; ***p<0.001; ****p<0.0001. Full statistical analyses are shown in Table 5.

[0015] FIG. 3. Neutralization potency against SARS-CoV-2 variant pseudovriuses elicited by SARS-CoV-2 S6P—HBsAgs. The sera at 2 weeks post the second immunization with SARS-CoV-2 S2P (1-1206), S6P (1-1206), S6P-12-HBsAg or S6P-16-HBsAg were evaluated against SARS-CoV-2 D614G, B.1.351, B.1.617.2 and B.1.1.529 pseudoviruses. The ID50s were plotted in the box and whiskers format. The median ID50 was indicated by a horizontal line, and the data points in the median quartile of each group were boxed. The error bars represent 95% confidence interval. The immunogens and doses were indicated. The ID50s were plotted in a logarithmic scale as dot, diamond or triangle for 10, 2, and 0.4 μg doses, respectively. The geometric mean ID50 for each group was listed below each group. The statistical analyses were performed using the two-way ANOVA test. *p<0.05; **p<0.01.

[0016] FIG. 4. Durability of neutralizing antibody responses elicited by SARS-CoV-2 S6P—HBsAgs. The sera from mice immunized with DNA encoding SARS-CoV-2 S2P (1-1206), S6P (1-1206), S6P-12-HBsAg or S6P-16-HBsAg were tested from week 0 to week 45. The ID50s against WA1 pseudovirus were plotted against time. The geometric mean ID50s were shown for week 6 and 14. The ID50 for later time points were obtained from pooled sera for each group. The time courses were shown for the 10, 2 and 0.4 μg doses in different panels.

[0017] FIG. 5A-5B. Neutralization potency elicited by SARS-CoV-2 S6P—HBsAgs in mice preimmunized with RECOMBIVAX HB®. (5A) Immunization schema of SARS-CoV-2 constructs. SARS-CoV-2 S2P (1-1273) DNA matching the sequence of mRNA-1273, S6P (1-1206), S6P-12-HBsAg and S6P-16-HBsAg were administered to mice preimmunized with RECOMBIVAX HB®. (5B) Neutralization ID50s against WA1 (left) and B.1.1.529 (BA.1, right) pseudoviruses at week 10. The ID50s were shown in a logarithmic scale in the box and whiskers format. The data points in the median quartile of each group were boxed. The error bars represent 95% confidence interval for the ID50s. The doses and immunogens were indicated. The data from each animal were shown as dots, diamonds and triangles for 10, 2, and 0.4 μg, respectively. The geometric mean ID50 values were indicated. The statistical analyses were performed using the two-way ANOVA test. *p<0.05; ** P<0.01; ***p<0.001; ****p<0.0001.

[0018] FIG. 6. Immunoblots of the fractions of SARS-CoV-2 S6P—HBsAgs after ultracentrifugation. Fractions of S6P-8-HBsAg, S6P-12-HBsAg and S6P-16-HBsAg after ultracentrifugation through a sucrose gradient were shown from left to right. Two microliters of each sucrose fraction were spotted onto a nitrocellulose membrane and then blocked with 5% skim milk in phosphate buffered saline-tween (PBST) at room temperature for 1 hour. The membrane was washed with 15 ml PBST solution thrice. Following the washes, the membrane was incubated with 1 μg/ml mAb specific to the NTD, RBD or S2 domain of SARS-CoV-2 spike, in 10 ml of 5% skim milk in PBST at room temperature for 30 min. The membrane was then washed thrice. The horse radish peroxidase (HRP)-conjugated anti-human or anti-mouse secondary antibody ( 1/1000) was incubated with the membrane for 30 min at room temperature. The GE ECL kit was used to develop the membrane. The fractions were shown above the blots. “Top” refers to the layer laid on the top of the 20% sucrose cushion. Numbers denote the percentage of the sucrose solution in a buffer containing 20 mM MES, pH 6.0, 150 mM NaCl. “50b” stands for the band in 50% sucrose after ultracentrifugation. The mAbs S652-118, A23-58.1, LY-CoV555 and WS6, which are specific to the NTD, RBD and S2 domain of SARS-CoV-2 spike, respectively, were used and indicated on the right.

[0019] FIGS. 7A-7C. Antibody binding of SARS-CoV-2 S6P—HBsAg nanoparticles. ELISA binding to mAbs specific to different domains of SARS-CoV-2 spike was performed using plates coated with 1 μg/ml SARS-CoV-2 S2P, S6P, S6P-8-HBsAg, S6P-12-HBsAg, or S6P-16-HBsAg. Antibodies were tested from 0.95 pg/ml to 4 μg/ml. Goat anti-human IgG conjugated with horseradish peroxidase ( 1/2000) was used as the secondary antibody. Incubation with primary and secondary antibodies were done at room temperature for 1 h. Plates were developed using TMB at room temperature for 10 min, stopped with IN H₂SO₄. Optical density at 450 nm were measured and plotted against mAb concentrations shown in a logarithmic scale. The classification of the mAbs was indicated on the left for plots in each row.

[0020] FIG. 8. IgG titers against SARS-CoV-2 S2P, RBD and NTD. The sera at 2 weeks post the 1^{st} and 2^{nd} immunizations from mice originally naïve to HBsAg were tested. The coating WA1 protein or domains were listed on the left. Endpoint IgG titers were plotted in a logarithmic scale in the box and whiskers format. The data points in the median quartile of each group were boxed. The error bars represent 95% confidence interval. The data for 10, 2 and 0.4 μg doses were plotted as dots, diamonds and triangles, respectively. The doses and immunogens were indicated. Statistical analyses were performed using two-way ANOVA test. *p<0.05; **p<0.01; ***p<0.001; ****p<0.0001.

[0021] FIG. 9. Neutralization ID80s against SARS-CoV-2 WA1 and variant pseudoviruses. The sera at 2 weeks post the second immunization were evaluated against SARS-CoV-2 WA1, D614G, B.1.351, B.1.617.2 and B.1.1.529 pseudoviruses. The ID80s were plotted in a logarithmic scale in the box and whiskers format. The data points in the median quartile of each group were boxed. The error bars represent 95% confidence interval. The doses and immunogens were indicated. The data were plotted as dots, diamonds or triangles for 10, 2, and 0.4 μg doses, respectively. The statistical analyses were performed using the two-way ANOVA test. *p<0.05; **p<0.01; ***p<0.001.

[0022] FIG. 10. IgG titers against SARS-CoV-2 variant S2Ps. Week 2 (left) and week 6 (right) sera from mice at 2 weeks post the 1st or 2nd DNA immunizations plus electroporation were tested. Endpoint IgG titers were plotted in a logarithmic scale in the box and whiskers format. The data points in the median quartile of each group were boxed. The error bars represent 95% confidence interval. The data for 10, 2 and 0.4 μg doses were shown as dots, diamonds and triangles, respectively. The doses and immunogens were indicated below the plots. Statistical analyses were performed using two-way ANOVA test. *p<0.05; ** p<0.01; ***p<0.001; ****p<0.0001. Less data points were shown for some groups due to the unavailability of the sera for the missing ones. Data points less than 5 in a group were not included in the statistical analyses.

[0023] FIG. 11. Neutralization potency at weeks 6 and 14 elicited by SARS-CoV-2 S6P—HBsAgs. Week 6 and 14 sera after two DNA immunizations plus electroporation were tested. WA1 ID50 (top) and ID80s (bottom) were plotted in a logarithmic scale in the box and whiskers format. The data points in the median quartile in each group were boxed. The error bars indicate 95% confidence interval. The data for 10, 2 and 0.4 μg doses were plotted as dots, diamonds and triangles, respectively.

[0024] FIG. 12. Durability of anti-spike responses elicited by SARS-CoV-2 S6P—HBsAg. The endpoint IgG titers against WA1 S2P from week 0 to week 45 were shown from left to right for mice immunized twice with S2P (1-1206), S6P (1-1206), S6P-12-HBsAg or S6P-16-HBsAg. 10, 2 and 0.4 μg groups were shown from top to bottom. The endpoint IgG titer from each animal was shown as an individual diamond. The geometric mean titer of each group was shown as a black horizontal bar. Arrows indicate DNA immunizations at week 0 and 4 followed by electroporation.

[0025] FIG. 13. Durability of anti-HBsAg responses elicited by SARS-CoV-2 S6P—HBsAg. The endpoint titers against HBsAg from week 0 to week 45 were shown from left to right for mice immunized twice with S2P (1-1206), S6P (1-1206), S6P-12-HBsAg or S6P-16-HBsAg. 10, 2 and 0.4 μg groups were shown from top to bottom. The endpoint IgG titer from each animal was shown as an individual diamond. The geometric mean titer of each group was shown as a black horizontal bar. Arrows indicate DNA immunizations at weeks 0 and 4 followed by electroporation.

[0026] FIG. 14. Durability of neutralizing antibody responses elicited by SARS-CoV-2 S6P—HBsAgs. The sera from mice immunized with DNA encoding SARS-CoV-2 S2P (1-1206), S6P (1-1206), S6P-12-HBsAg or S6P-16-HBsAg were tested from week 0 to week 45. The ID80s against WA1 pseudovirus for each group were plotted against time. The geometric mean ID80s were shown for weeks 6 and 14. The ID80 for later time points were obtained from pooled sera for each group. The time courses were shown for the 10, 2 and 0.4 μg doses in different panels.

[0027] FIG. 15. Anti-HBsAg endpoint titers in mice preimmunized with RECOMBIVAX HB®. Week 3, 6 and 10 sera from mice preimmunized with RECOMBIVAX HB® followed by one or two DNA immunizations plus electroporation were tested. Endpoint IgG titers were plotted in a logarithmic scale in the box and whiskers format. The data points in the median quartile in each group were boxed. The error bars indicate 95% confidence interval. The data for 10, 2 and 0.4 μg doses were plotted as dots, diamonds and triangles, respectively. The doses and immunogens were indicated. Statistical analyses were performed using the two-way ANOVA test. *p<0.05; **p<0.01; ***p<0.001; ****p<0.0001.

[0028] FIG. 16. IgG titers against SARS-CoV-2 WA1 and BA.1 S2Ps in mice preimmunized with RECOMBIVAX HB®. Week 6 and 10 sera from mice preimmunized with RECOMBIVAX HB® followed by one or two DNA immunizations plus electroporation were tested. WA1 and BA.1 S2Ps were used to coat plates and indicated on the top, respectively. Endpoint IgG titers were plotted in a logarithmic scale in the box and whiskers format. The data points in the median quartile of each group were boxed. Error bars represent 95% confidence interval. The data for 10, 2 and 0.4 μg doses were shown as dots, diamonds and triangles, respectively. The doses and immunogens were indicated. Statistical analyses were performed using the two-way ANOVA test. *p<0.05; **p<0.01; ***p<0.001; ****p<0.0001.

[0029] FIGS. 17A-17C. Neutralization potency in mice preimmunized with RECOMBIVAX HB®. (17A) ID80s against SARS-CoV-2 WA1 pseudovirus. (17B) ID80s against BA.1 pseudovirus. The sera at 2 weeks post the second DNA immunization plus electroporation from mice preimmunized with RECOMBIVAX HB® were evaluated. The ID80s were plotted in a logarithmic scale in the box and whiskers format. The data points in the median quartile in each group were boxed. Error bars represent 95% confidence interval. The doses and immunogens were indicated. The ID80s were plotted as dots, diamonds and triangles for 10, 2, and 0.4 μg doses, respectively. The statistical analyses were performed using the two-way ANOVA test. *p<0.05; **p<0.01; ***p<0.001; ****p<0.0001. (17C) Neutralization potency against HBV for sera at 2 weeks post the second DNA immunization plus electroporation from mice preimmunized with RECOMBIVAX HB®. Normalized HBV DNA copies to viral control DNA copies in percentage were plotted against serum dilution factors. The data were obtained using pooled sera from each group (n=10). The ID50 and ID80 titers were listed on the right.

[0030] FIGS. 18A-18C. Comparison of neutralization potency in mice with and without RECOMBIVAX HB® pre-vaccination. (18A) and (18B) were adopted from FIG. 2; (18C) was from FIG. 5 and FIG. 17A. The data were plotted in a logarithmic scale in the box and whiskers format. The data points in the median quartile in each group were boxed. Error bars represent 95% confidence interval. The doses and immunogens were indicated below the plots. The data points from each animal were shown as dots, diamonds or triangles for 10, 2, and 0.4 μg doses, respectively. The statistical analyses were performed using the two-way ANOVA test. *p<0.05; **p<0.01; ***p<0.001; ****p<0.0001.

### SEQUENCES

[0031] The nucleic and amino acid sequences listed in the accompanying sequence listing are shown using standard letter abbreviations for nucleotide bases, and single letter code for amino acids, as defined in 37 C.F.R. 1.822. Only one strand of each nucleic acid sequence is shown, but the complementary strand is understood as included by any reference to the displayed strand. The Sequence Listing is submitted as an XML file in the form of the file named “106861-02 Sequence Listing” (1,007,616 bytes), which was created on Nov. 10, 2022, which is incorporated by reference herein.

### DETAILED DESCRIPTION

### I. Terms

[0032] Unless otherwise noted, technical terms are used according to conventional usage. Definitions of common terms in molecular biology may be found in Benjamin Lewin, Genes X, published by Jones & Bartlett Publishers, 2009; and Meyers et al. (eds.), The Encyclopedia of Cell Biology and Molecular Medicine, published by Wiley-VCH in 16 volumes, 2008; and other similar references.

[0033] As used herein, the singular forms “a,” “an,” and “the,” refer to both the singular as well as plural, unless the context clearly indicates otherwise. For example, the term “an antigen” includes single or plural antigens and can be considered equivalent to the phrase “at least one antigen.” As used herein, the term “comprises” means “includes.” It is further to be understood that any and all base sizes or amino acid sizes, and all molecular weight or molecular mass values, given for nucleic acids or polypeptides are approximate, and are provided for descriptive purposes, unless otherwise indicated. Although many methods and materials similar or equivalent to those described herein can be used, particular suitable methods and materials are described herein. In case of conflict, the present specification, including explanations of terms, will control. In addition, the materials, methods, and examples are illustrative only and not intended to be limiting. To facilitate review of the various aspects, the following explanations of terms are provided:

[0034] Adjuvant: A component of an immunogenic composition used to enhance antigenicity. In some aspects, an adjuvant can include a suspension of minerals (alum, aluminum hydroxide, or phosphate) on which antigen is adsorbed; or water-in-oil emulsion, for example, in which antigen solution is emulsified in mineral oil (Freund incomplete adjuvant), sometimes with the inclusion of killed mycobacteria (Freund's complete adjuvant) to further enhance antigenicity (inhibits degradation of antigen and/or causes influx of macrophages). In some aspects, the adjuvant used in a disclosed immunogenic composition is a combination of lecithin and carbomer homopolymer (such as the ADJUPLEX™ adjuvant available from Advanced BioAdjuvants, LLC; see also Wegmann, Clin Vaccine Immunol 22 (9): 1004-1012, 2015). Additional adjuvants for use in the disclosed immunogenic compositions include the QS21 purified plant extract, Matrix M, AS01, MF59, and ALFQ adjuvants. Immunostimulatory oligonucleotides (such as those including a CpG motif) can also be used as adjuvants. Adjuvants include biological molecules (a “biological adjuvant”), such as costimulatory molecules. Exemplary adjuvants include IL-2, RANTES, GM-CSF, TNF-α, IFN-γ, G-CSF, LFA-3, CD72, B7-1, B7-2, OX-40L, 4-1BBL and toll-like receptor (TLR) agonists, such as TLR-9 agonists. The person of ordinary skill in the art is familiar with adjuvants (see, e.g., Singh (ed.) Vaccine Adjuvants and Delivery Systems. Wiley-Interscience, 2007).

[0035] Administration: The introduction of an agent, such as a nucleic acid molecule encoding a SARS-CoV-2 S ectodomain-HBsAg fusion protein as disclosed herein, into a subject by a chosen route. Administration can be local or systemic. For example, if the chosen route is intranasal, the agent is administered by introducing the composition into the nasal passages of the subject. Exemplary routes of administration include, but are not limited to, oral, injection (such as subcutaneous, intramuscular, intradermal, intraperitoneal, and intravenous), sublingual, rectal, transdermal (for example, topical), intranasal, vaginal, and inhalation routes.

[0036] Amino acid substitution: The replacement of one amino acid in a polypeptide with a different amino acid.

[0037] Carrier: An immunogenic molecule to which an antigen can be linked. When linked to a carrier, the antigen may become more immunogenic. Carriers are chosen to increase the immunogenicity of the antigen and/or to elicit antibodies against the carrier which are diagnostically, analytically, and/or therapeutically beneficial. Useful carriers include polymeric carriers, which can be natural (for example, proteins from bacteria or viruses), semi-synthetic or synthetic materials containing one or more functional groups to which a reactant moiety can be attached.

[0038] Conservative variants: “Conservative” amino acid substitutions are those substitutions that do not substantially affect or decrease a function of a protein, such as the ability of the protein to induce an immune response when administered to a subject. The term conservative variation also includes the use of a substituted amino acid in place of an unsubstituted parent amino acid. Furthermore, deletions or additions which alter, add or delete a single amino acid or a small percentage of amino acids (for instance less than 5%, in some aspects less than 1%) in an encoded sequence are conservative variations where the alterations result in the substitution of an amino acid with a chemically similar amino acid.

[0039] The following six groups are examples of amino acids that are considered to be conservative substitutions for one another:
[0040] 1) Alanine (A), Serine(S), Threonine (T);
[0041] 2) Aspartic acid (D), Glutamic acid (E);
[0042] 3) Asparagine (N), Glutamine (Q);
[0043] 4) Arginine (R), Lysine (K);
[0044] 5) Isoleucine (I), Leucine (L), Methionine (M), Valine (V); and
[0045] 6) Phenylalanine (F), Tyrosine (Y), Tryptophan (W).

[0046] Non-conservative substitutions are those that reduce an activity or function of the SARS-CoV-2 S ectodomain-HBsAg fusion protein, such as the ability to self-assemble or induce an immune response when administered to a subject. For instance, if an amino acid residue is essential for a function of the protein, even an otherwise conservative substitution may disrupt that activity. Thus, a conservative substitution does not alter the basic function of a protein of interest.

[0047] Control: A reference standard. In some aspects, the control is a negative control sample obtained from a healthy patient. In other aspects, the control is a positive control sample obtained from a patient diagnosed with a Coronavirus infection, such as a SARS-CoV-2 infection. In still other aspects, the control is a historical control or standard reference value or range of values (such as a previously tested control sample, such as a group of SARS-CoV-2 patients with a known prognosis or outcome, or group of samples that represent baseline or normal values).

[0048] A difference between a test sample and a control can be an increase or conversely a decrease. The difference can be a qualitative difference or a quantitative difference, for example a statistically significant difference. In some examples, a difference is an increase or decrease, relative to a control, of at least about 5%, such as at least about 10%, at least about 20%, at least about 30%, at least about 40%, at least about 50%, at least about 60%, at least about 70%, at least about 80%, at least about 90%, at least about 100%, at least about 150%, at least about 200%, at least about 250%, at least about 300%, at least about 350%, at least about 400%, at least about 500%, or greater than 500%.

[0049] Coronavirus: A large family of positive-sense, single-stranded RNA viruses that can infect humans and non-human animals. Coronaviruses get their name from the crown-like spikes on their surface. The viral envelope is comprised of a lipid bilayer containing the viral membrane (M), envelope (E) and spike(S) proteins. Most coronaviruses cause mild to moderate upper respiratory tract illness, such as the common cold. However, three coronaviruses have emerged that can cause more serious illness and death: severe acute respiratory syndrome coronavirus (SARS-CoV or SARS-CoV-1), SARS-CoV-2, and Middle East respiratory syndrome coronavirus (MERS-CoV). Other coronaviruses that infect humans include human coronavirus 229E (229E-CoV), human coronavirus NL63 (NL63-CoV), human coronavirus OC43 (OC43-CoV), and human coronavirus HKU1 (HKU1-CoV).

[0050] Coronavirus Disease 2019 (COVID-19): A disease caused by SARS-CoV-2 infection. Common symptoms include fever, cough, fatigue, shortness of breath or breathing difficulties, and loss of smell and taste. The incubation period may range from one to fourteen days. While most patients have mild symptoms, some develop severe COVID-19 disease, often characterized by acute respiratory distress syndrome (ARDS) that is precipitated by cytokine storm, multi-organ failure, septic shock, and blood clots, and often requiring hospitalization and possible ventilation-based breathing assistance.

[0051] A host of underlying medical conditions are known to lead to increased risk of COVID-19, and severe COVID-19, following infection with SARS-CoV-2. Non-limiting examples include heart disease, cancer, chronic obstructive pulmonary disease, type 2 diabetes, type 1 diabetes, obesity, chronic kidney disease, sickle cell disease, asthma, liver disease, chronic lung disease, high blood pressure, or a suppressed immune system due to medical treatment, infection with a pathogen other than SARS-CoV-2, or an autoimmune disorder.

[0052] The World Health Organization (WHO) has published testing guidelines for COVID-19 diagnosis (see, e.g., Laboratory Guidelines for the Detection and Diagnosis of COVID-19 virus infection, July 2020). The standard method of testing for SARS-CoV-2 infection is real-time reverse transcription polymerase chain reaction (rRT-PCR) on respiratory samples obtained by a nasopharyngeal swab. Standard diagnostic methods of the detection of symptoms of COVID-19 are also utilized (e.g., lung inflammation, shortness of breath, low oxygen saturation, etc).

[0053] Degenerate variant: A polynucleotide encoding a polypeptide that includes a sequence that is degenerate as a result of the genetic code. There are 20 natural amino acids, most of which are specified by more than one codon. Therefore, all degenerate nucleotide sequences are included as long as the amino acid sequence of the polypeptide is unchanged.

[0054] Effective amount: An amount of agent, such as a nucleic acid molecule encoding a Coronavirus S ectodomain—HBsAg fusion protein (for example, a SARS-CoV-2 S ectodomain—HBsAg fusion protein) as described herein, that is sufficient to elicit a desired response, such as an immune response in a subject. It is understood that to obtain a protective immune response against an antigen of interest can require multiple administrations of a disclosed immunogen, and/or administration of a disclosed immunogen as the “prime” in a prime boost protocol wherein the boost immunogen can be different from the prime immunogen. Accordingly, an effective amount of a disclosed immunogen can be the amount of the immunogen sufficient to elicit a priming immune response in a subject that can be subsequently boosted with the same or a different immunogen to elicit a protective immune response.

[0055] In one example, a desired response is to inhibit or reduce or prevent SARS-CoV-2 infection. The SARS-CoV-2 infection does not need to be completely eliminated or reduced or prevented for the method to be effective. For example, administration of an effective amount of the agent can induce an immune response that decreases the SARS-CoV-2 infection (for example, as measured by infection of cells, or by number or percentage of subjects infected by the SARS-CoV-2) by a desired amount, for example by at least 50%, at least 60%, at least 70%, at least 80%, at least 90%, at least 95%, at least 98%, or even at least 100% (elimination or prevention of detectable SARS-CoV-2 infection), as compared to a suitable control.

[0056] Expression: Transcription or translation of a nucleic acid sequence. For example, a gene is expressed when its DNA is transcribed into an RNA or RNA fragment, which in some examples is processed to become mRNA. A gene may also be expressed when its mRNA is translated into an amino acid sequence, such as a protein or a protein fragment. In a particular example, a heterologous gene is expressed when it is transcribed into an RNA. In another example, a heterologous gene is expressed when its RNA is translated into an amino acid sequence. The term “expression” is used herein to denote either transcription or translation. Regulation of expression can include controls on transcription, translation, RNA transport and processing, degradation of intermediary molecules such as mRNA, or through activation, inactivation, compartmentalization or degradation of specific protein molecules after they are produced.

[0057] Expression Control Sequences: Nucleic acid sequences that regulate the expression of a heterologous nucleic acid sequence to which it is operatively linked. Expression control sequences are operatively linked to a nucleic acid sequence when the expression control sequences control and regulate the transcription and, as appropriate, translation of the nucleic acid sequence. Thus expression control sequences can include appropriate promoters, enhancers, transcription terminators, a start codon (ATG) in front of a protein-encoding gene, splicing signal for introns, maintenance of the correct reading frame of that gene to permit proper translation of mRNA, stop codons, 5′ and 3′ UTRs, a Poly A tail, etc. The term “control sequences” is intended to include, at a minimum, components whose presence can influence expression, and can also include additional components whose presence is advantageous, for example, leader sequences and fusion partner sequences. Expression control sequences can include a promoter.

[0058] A promoter is a minimal sequence sufficient to direct transcription. Also included are those promoter elements which are sufficient to render promoter-dependent gene expression controllable for cell-type specific, tissue-specific, or inducible by external signals or agents; such elements may be located in the 5′ or 3′ regions of the gene. Both constitutive and inducible promoters are included (see for example, Bitter et al., Methods in Enzymology 153:516-544, 1987). For example, when cloning in bacterial systems, inducible promoters such as pL of bacteriophage lambda, pLac, pTRP, pTAC (ptrp-lac hybrid promoter) and the like may be used. In one aspect, when cloning in mammalian cell systems, promoters derived from the genome of mammalian cells (such as metallothionein promoter, EF1α promoter) or from mammalian viruses (such as the cytomegalovirus (CMV) promoter, the retrovirus long terminal repeat; the adenovirus late promoter; the vaccinia virus 7.5K promoter) can be used. Promoters produced by recombinant DNA or synthetic techniques may also be used to provide for transcription of the nucleic acid sequences.

[0059] Expression vector: A vector comprising a recombinant polynucleotide comprising expression control sequences operatively linked to a nucleotide sequence to be expressed. An expression vector comprises sufficient cis-acting elements for expression; other elements for expression can be supplied by the host cell or in an in vitro expression system. Expression vectors include all those known in the art, such as cosmids, plasmids (e.g., naked or contained in liposomes) and viruses (e.g., lentiviruses, retroviruses, adenoviruses, and adeno-associated viruses) that incorporate the recombinant polynucleotide.

[0060] Fusion Protein: A single polypeptide chain including the sequence of two or more heterologous proteins, often linked by a peptide linker.

[0061] Hepatitis B surface antigen (HBsAg): A Hepatitis B virus glycoprotein that forms an outer layer surrounding the viral nucleocapsid in native virions, which are approximately 30-42 nm in diameter. In native virions, HBsAg is expressed as three different proteins originating at different start codons along a single open reading frame, resulting in Large (L), Middle (M), and Small(S) surface antigen proteins. Isoforms of HBsAg differ by the number of domains. S has only the S domain, while M has both a Pre-S2 and an S domain, and L has a Pre-S1 domain in addition to the Pre-S2 and S domain. Recombinant HBsAg nanoparticles form by expression of the L, M, or S proteins alone or in combination in eukaryotic systems. Recombinant nanoparticles consisting of the HBsAg S protein alone are observed to have a diameter of about 22 nm and octahedral symmetry. Described herein is the fusion of a heterologous protein (SARS-CoV-2 S ectodomain) to the N-terminus of a HBsAg protein (such as a HBsAg S, HBsAg M, or HBsAg L protein) to form a HBsAg nanoparticle displaying the SARS-CoV-2 S ectodomain on the surface of the nanoparticle.

[0062] Heterologous: Originating from a separate genetic source or species. For example, a heterologous polypeptide or polynucleotide refers to a polypeptide or polynucleotide derived from a different source or species.

[0063] Host cells: Cells in which a vector can be propagated and its DNA can be expressed. The cell may be prokaryotic or eukaryotic. The term also includes any progeny of the subject host cell. It is understood that all progenies may not be identical to the parental cell since there may be mutations that occur during replication. However, such progenies are included when the term “host cell” is used.

[0064] Immune response: A response of a cell of the immune system, such as a B cell, T cell, or monocyte, to a stimulus. In some aspects, the response is specific for a particular antigen (an “antigen-specific response”), such as a SARS-CoV-2 spike protein. In some aspects, the immune response is a T cell response, such as a CD4+ response or a CD8+ response. In other aspects, the response is a B cell response, and results in the production of specific antibodies. “Priming an immune response” refers to treatment of a subject with a “prime” immunogen/immunogenic composition to induce an immune response that is subsequently “boosted” with a boost immunogen/immunogenic composition. Together, the prime and boost immunizations produce the desired immune response in the subject.

[0065] Immunogenic composition: A composition that includes a nucleic acid molecule encoding a Coronavirus S ectodomain-HBsAg fusion protein (such as a SARS-CoV-2 S ectodomain-HBsAg fusion protein) as described herein that elicits a measurable Cytotoxic T lymphocytes (CTL) response against the Coronavirus S ectodomain (such as SARS-CoV-2 S ectodomain), and/or elicits a measurable B cell response (such as production of antibodies) against the Coronavirus S ectodomain (such as SARS-CoV-2 S ectodomain), when administered to a subject. For in vivo use, the immunogenic composition can include the nucleic acid molecule in a pharmaceutically acceptable carrier and may also include other agents, such as an adjuvant.

[0066] Isolated: An “isolated” biological component has been substantially separated or purified away from other biological components, such as other biological components in which the component naturally occurs, such as other chromosomal and extrachromosomal DNA, RNA, and proteins. Proteins, peptides, nucleic acids, and viruses that have been “isolated” include those purified by standard purification methods. Isolated does not require absolute purity, and can include protein, peptide, nucleic acid, or virus molecules that are at least 50% isolated, such as at least 75%, 80%, 90%, 95%, 98%, 99%, or even 99.9% isolated.

[0067] Nucleic acid molecule: A polymeric form of nucleotides, which may include both sense and anti-sense strands of RNA, mRNA, circular RNA, cDNA, genomic DNA, and synthetic forms and mixed polymers of the above. A nucleotide refers to a ribonucleotide, deoxynucleotide or a modified form of either type of nucleotide. The term “nucleic acid molecule” as used herein is synonymous with “nucleic acid” and “polynucleotide.” A nucleic acid molecule is usually at least 10 bases in length, unless otherwise specified. The term includes single- and double-stranded forms of DNA. A polynucleotide may include either or both naturally occurring and modified nucleotides linked together by naturally occurring and/or non-naturally occurring nucleotide linkages. “cDNA” refers to a DNA that is complementary or identical to an mRNA, in either single stranded or double stranded form. “Encoding” refers to the inherent property of specific sequences of nucleotides in a polynucleotide, such as a gene, a cDNA, an mRNA, or a circular RNA to serve as templates for synthesis of other polymers and macromolecules in biological processes having either a defined sequence of nucleotides (i.e., rRNA, tRNA and mRNA) or a defined sequence of amino acids and the biological properties resulting therefrom.

[0068] Operably linked: A first nucleic acid sequence is operably linked with a second nucleic acid sequence when the first nucleic acid sequence is placed in a functional relationship with the second nucleic acid sequence. For instance, a promoter is operably linked to a coding sequence if the promoter affects the transcription or expression of the coding sequence. Generally, operably linked nucleic acid sequences are contiguous and, where necessary to join two protein-coding regions, in the same reading frame.

[0069] Pharmaceutically acceptable carriers: The pharmaceutically acceptable carriers of use are conventional. Remington's Pharmaceutical Sciences, by E. W. Martin, Mack Publishing Co., Easton, PA, 19th Edition, 1995, describes compositions and formulations suitable for pharmaceutical delivery of the disclosed immunogens (such as a nucleic acid molecule encoding a SARS-CoV-2 S ectodomain-HBsAg fusion protein) and immunogenic compositions containing the immunogens.

[0070] In general, the nature of the carrier will depend on the particular mode of administration being employed. For instance, parenteral formulations usually comprise injectable fluids that include pharmaceutically and physiologically acceptable fluids such as water, physiological saline, balanced salt solutions, aqueous dextrose, glycerol or the like as a vehicle. For solid compositions (e.g., powder, pill, tablet, or capsule forms), conventional non-toxic solid carriers can include, for example, pharmaceutical grades of mannitol, lactose, starch, or magnesium stearate. In addition to biologically neutral carriers, pharmaceutical compositions to be administered can contain minor amounts of non-toxic auxiliary substances, such as wetting or emulsifying agents, preservatives, and pH buffering agents and the like, for example, sodium acetate or sorbitan monolaurate. In particular aspects, suitable for administration to a subject the carrier may be sterile, and/or suspended or otherwise contained in a unit dosage form containing one or more measured doses of the composition suitable to elicit the desired immune response. It may also be accompanied by medications for its use for treatment purposes. The unit dosage form may be, for example, in a sealed vial that contains sterile contents or a syringe for injection into a subject, or lyophilized for subsequent solubilization and administration or in a solid or controlled release dosage.

[0071] Preventing, treating or ameliorating a disease: “Preventing” a disease refers to inhibiting the full development of a disease. “Treating” refers to a therapeutic intervention that ameliorates a sign or symptom of a disease or pathological condition after it has begun to develop, such as a reduction in viral load. “Ameliorating” refers to the reduction in the number or severity of signs or symptoms of a disease, such as a coronavirus infection.

[0072] Recombinant: A recombinant nucleic acid, vector or virus is one that has a sequence that is not naturally occurring or has a sequence that is made by an artificial combination of two otherwise separated segments of sequence. This artificial combination can be accomplished, for example, by the artificial manipulation of isolated segments of nucleic acids, for example, using genetic engineering techniques.

[0073] SARS-CoV-2: A positive-sense, single stranded RNA virus of the genus betacoronavirus that has emerged as a highly fatal cause of severe acute respiratory infection. The viral genome is capped, polyadenylated, and covered with nucleocapsid proteins. The SARS-CoV-2 virion includes a viral envelope with large spike glycoproteins. The SARS-CoV-2 genome, like most coronaviruses, has a common genome organization with the replicase gene included in the 5′-two thirds of the genome, and structural genes included in the 3′-third of the genome. The SARS-CoV-2 genome encodes the canonical set of structural protein genes in the order 5′-spike(S)-envelope (E)-membrane (M) and nucleocapsid (N)-3′. Symptoms of SARS-CoV-2 infection include fever and respiratory illness, such as dry cough and shortness of breath. Cases of severe infection can progress to severe pneumonia, multi-organ failure, and death. The time from exposure to onset of symptoms is approximately 2 to 14 days.

[0074] Standard methods for detecting viral infection may be used to detect SARS-CoV-2 infection, including but not limited to, assessment of patient symptoms and background and genetic tests such as reverse transcription-polymerase chain reaction (rRT-PCR). The test can be done on patient samples such as respiratory or blood samples.

[0075] SARS-CoV-2 Spike(S): A class I fusion glycoprotein initially synthesized as a precursor protein of approximately 1273 amino acids in size. Individual precursor S polypeptides form a homotrimer and undergo glycosylation within the Golgi apparatus as well as processing to remove the signal peptide. The S polypeptide includes S1 and S2 proteins separated by a protease cleavage site between approximately position 685/686. Cleavage at this site generates separate S1 and S2 polypeptide chains, which remain associated as S1/S2 protomers within the homotrimer. It is believed that the beta coronaviruses are generally not cleaved prior to the low pH cleavage that occurs in the late endosome-early lysosome by the TMPRSS2 protease, at the start of the fusion peptide. The S1 subunit is distal to the virus membrane and contains the receptor-binding domain (RBD) that is believed to mediate virus attachment to its host receptor. The S2 subunit is believed to contain the fusion protein machinery, such as the fusion peptide, two heptad-repeat sequences (HR1 and HR2) and a central helix typical of fusion glycoproteins, a transmembrane domain, and the cytosolic tail domain.

[0076] Unless context indicates otherwise, the numbering used in the disclosed SARS-CoV-2 S proteins and fragments thereof is relative to the S protein of SARS-CoV-2, the sequence of which is provided as SEQ ID NO: 1, and deposited as NCBI Ref. No. YP_009724390.1, which is incorporated by reference herein in its entirety.

[0077] Sequence identity: The similarity between amino acid or nucleotide sequences is expressed in terms of the similarity between the sequences, otherwise referred to as sequence identity. Sequence identity is frequently measured in terms of percentage identity; the higher the percentage, the more similar the two sequences are. Homologs, orthologs, or variants of a polypeptide or polynucleotide will possess a relatively high degree of sequence identity when aligned using standard methods.

[0078] Methods of alignment of sequences for comparison are known. Various programs and alignment algorithms are described in: Smith & Waterman, Adv. Appl. Math. 2:482, 1981; Needleman & Wunsch, J. Mol. Biol. 48:443, 1970; Pearson & Lipman, Proc. Natl. Acad. Sci. USA 85:2444, 1988; Higgins & Sharp, Gene, 73:237-44, 1988; Higgins & Sharp, CABIOS 5:151-3, 1989; Corpet et al., Nuc. Acids Res. 16:10881-90, 1988; Huang et al. Computer Appls. In the Biosciences 8, 155-65, 1992; and Pearson et al., Meth. Mol. Bio. 24:307-31, 1994. Altschul et al., J. Mol. Biol. 215:403-10, 1990, presents a detailed consideration of sequence alignment methods and homology calculations.

[0079] Variants of a polypeptide or nucleic acid sequence are typically characterized by possession of at least about 75%, for example, at least about 80%, 85%, 90%, 91%, 92%, 93%, 94%, 95%, 96%, 97%, 98% or 99% sequence identity counted over the full-length alignment with the amino acid or nucleotide sequence of interest. Sequences with even greater similarity to the reference sequences will show increasing percentage identities when assessed by this method, such as at least 80%, at least 85%, at least 90%, at least 95%, at least 98%, or at least 99% sequence identity. When less than the entire sequence is being compared for sequence identity, homologs and variants will typically possess at least 80% sequence identity over short windows of 10-20 amino acids (or 30-60 nucleotides), and may possess sequence identities of at least 85% or at least 90% or 95% depending on their similarity to the reference sequence. Methods for determining sequence identity over such short windows are available at the NCBI website on the internet.

[0080] As used herein, reference to “at least 90% identity” (or similar language) refers to “at least 90%, at least 91%, at least 92%, at least 93%, at least 94%, at least 95%, at least 96%, at least 97%, at least 98%, at least 99%, or even 100% identity” to a specified reference sequence.

[0081] Signal Peptide: A short amino acid sequence (e.g., approximately 10-35 amino acids in length) that directs newly synthesized secretory or membrane proteins to and through membranes (for example, the endoplasmic reticulum membrane). Signal peptides are typically located at the N-terminus of a polypeptide and are removed by signal peptidases. Signal peptide sequences typically contain three common structural features: an N-terminal polar basic region (n-region), a hydrophobic core, and a hydrophilic c-region).

[0082] Single chain SARS-CoV-2 S ectodomain: A recombinant SARS-CoV-2 S ectodomain including the SARS-CoV-2 S1 and S2 domains in a single contiguous polypeptide chain. Single chain SARS-CoV-2 S ectodomain can trimerize to form a SARS-CoV-2 S ectodomain trimer. A single SARS-CoV-2 S ectodomain provided herein includes mutations to prevent protease cleavage at the S1/S2 cleavage site. Therefore, when produced in cells, the SARS-CoV-2 S polypeptide harboring such a mutated furin cleavage site is not cleaved into separate S1 and S2 polypeptide chains.

[0083] Subject: Living multicellular vertebrate organisms, a category that includes human and non-human mammals. In some aspects, the subject is a human. In some examples, a subject who is in need of inhibiting or preventing a SARS-CoV-2 infection is selected. For example, the subject can be uninfected and at risk of SARS-CoV-2 infection.

[0084] Vaccine: A pharmaceutical composition that elicits a prophylactic or therapeutic immune response in a subject. In some cases, the immune response is a protective immune response. Typically, a vaccine elicits an antigen-specific immune response to an antigen of a pathogen, for example a viral pathogen, or to a cellular constituent correlated with a pathological condition. A vaccine may include a polynucleotide (such as a nucleic acid encoding a disclosed antigen), a peptide or polypeptide (such as a disclosed antigen), a virus, a cell or one or more cellular constituents. In one specific, non-limiting example, a vaccine reduces the severity of the symptoms associated with SARS-CoV-2 infection and/or decreases the viral load compared to a control. In another non-limiting example, a vaccine reduces SARS-CoV-2 infection and/or transmission compared to a control.

[0085] Vector: An entity containing a DNA or RNA molecule bearing a promoter(s) that is operationally linked to the coding sequence of a protein (such as an immunogenic protein) of interest and can express the coding sequence. Non-limiting examples include a naked or packaged (lipid and/or protein) DNA, a naked or packaged RNA, a subcomponent of a virus or bacterium or other microorganism that may be replication-incompetent, or a virus or bacterium or other microorganism that may be replication-competent. A vector is sometimes referred to as a construct. Recombinant DNA vectors are vectors having recombinant DNA. A vector can include nucleic acid sequences that permit it to replicate in a host cell, such as an origin of replication. A vector can also include one or more selectable marker genes and other genetic elements. Viral vectors are recombinant nucleic acid vectors having at least some nucleic acid sequences derived from one or more viruses. Non-limiting examples of viral vectors include adenovirus vectors (such as Ad26, Ad5, or ChAdOx1 recombinant vector, adeno-associated virus (AAV) vectors, and poxvirus vectors (e.g., vaccinia, fowlpox).

### II. Nucleic Acid Molecules Encoding Coronavirus SARS-CoV-2 S Ectodomain—HBsAg Fusion Proteins

### A. Nucleic Acid Molecules Encoding SARS-CoV-2 S Ectodomain—HBsAg Fusion Proteins

[0086] Disclosed herein are nucleic acid molecules encoding a fusion protein comprising a recombinant SARS-CoV-2 S ectodomain fused via a peptide linker to a HBsAg protein. When expressed in mammalian cells (for example, by administration to a mammalian subject), the fusion protein self-assembles to form a HBsAg nanoparticle with SARS-CoV-2 S ectodomain trimers extending radially outward from an outer surface of the HBsAg nanoparticle. The SARS-CoV-2 S ectodomain include one or more amino acid substitutions that stabilize the ectodomain trimer in its prefusion conformation.

[0087] An exemplary sequence of native SARS-CoV-2 S protein (including the native ectodomain and TM and CT domains) is provided as SEQ ID NO: 1 (NCBI Ref. No. YP_009724390.1, incorporated by reference herein):

MFVFLVLLPLVSSQCVNLTTRTQLPPAYTNSFTRGVYYPDKVERSSVLHSTQDLFLPFFSNVTWFHAIHVSG
TNGTKRFDNPVLPENDGVYFASTEKSNIIRGWIFGTTLDSKTQSLLIVNNAINVVIKVCEFQFCNDPFLGVY
YHKNNKSWMESEFRVYSSANNCTFEYVSQPFLMDLEGKQGNEKNLREFVEKNIDGYFKIYSKHTPINLVRDL
PQGFSALEPLVDLPIGINITRFQTLLALHRSYLTPGDSSSGWTAGAAAYYVGYLQPRTELLKYNENGTITDA
VDCALDPLSETKCTLKSFTVEKGIYQTSNERVQPTESIVREPNIINLCPFGEVENATRFASVYAWNRKRISN
CVADYSVLYNSASESTFKCYGVSPTKLNDLCFTNVYADSFVIRGDEVRQIAPGQTGKIADYNYKLPDDETGC
VIAWNSNNLDSKVGGNYNYLYRLERKSNLKPFERDISTEIYQAGSTPCNGVEGENCYFPLQSYGFQPINGVG
YQPYRVVVLSFELLHAPATVCGPKKSTNLVKNKCVNFNFNGLIGTGVLTESNKKELPFQQFGRDIADTIDAV
RDPQTLEILDITPCSFGGVSVITPGINTSNQVAVLYQDVNCTEVPVAIHADQLTPTWRVYSTGSNVFQTRAG
CLIGAEHVNNSYECDIPIGAGICASYQTQTNSPRRARSVASQSIIAYTMSLGAENSVAYSNNSIAIPTNFTI
SVTTEILPVSMTKISVDCTMYICGDSTECSNLLLQYGSFCTQLNRALTGIAVEQDKNTQEVFAQVKQIYKTP
PIKDFGGFNFSQILPDPSKPSKRSFIEDLLENKVTLADAGFIKQYGDCLGDIAARDLICAQKENGLIVLPPL
LIDEMIAQYISALLAGTITSGWTFGAGAALQIPFAMQMAYRFNGIGVTQNVLYENQKLIANQFNSAIGKIQD
SLSSTASALGKLQDVVNQNAQALNTLVKQLSSNFGAISSVLNDILSRLDKVEAEVQIDRLITGRLQSLQTYV
TQQLIRAAEIRASANLAATKMSECVLGQSKRVDFCGKGYHLMSFPQSAPHGVVFLHVTYVPAQEKNETTAPA
ICHDGKAHFPREGVFVSNGTHWFVTQRNFYEPQIITTDNTFVSGNCDVVIGIVNNTVYDPLQPELDSFKEEL
DKYFKNHTSPDVDLGDISGINASVVNIQKEIDRLNEVAKNLNESLIDLQELGKYEQYIKWPWYIWLGFIAGL
IAIVMVTIMLCCMTSCCSCLKGCCSCGSCCKFDEDDSEPVLKGVKLHYT

[0088] The amino acid numbering used herein for residues of the SARS-CoV-2 S protein is with reference to the SARS-CoV-2 S sequence provided as SEQ ID NO: 1. With reference to the SARS-CoV-2 S protein sequence provided as SEQ ID NO: 1, the ectodomain of the SARS-CoV-2 S protein includes about residues 14-1206. Residues 1-13 are the signal peptide, which is removed during cellular processing. The S1/S2 cleavage site is located at position 685/686. The HR1 is located at about residues 915-983. The central helix is located at about residues 988-1029. The HR2 is located at about 1162-1194. The C-terminal end of the S2 ectodomain is located at about residue 1208. In some aspects, the protomers of the prefusion-stabilized SARS-CoV-2 S ectodomain trimer can have a C-terminal residue of the C-terminal residue of the HR2 (e.g., position 1194), or the ectodomain (e.g., position 1208), or from one of positions 1194-1208. The position numbering of the S protein may vary between SARS-CoV-2 stains, but the sequences can be aligned to determine relevant structural domains and cleavage sites. It will be appreciated that a few residues (such as up to 10) on the N- and/or C-terminal ends of the ectodomain can be removed or modified in the disclosed immunogens without decreasing the utility of the S ectodomain as an immunogen.

[0089] The recombinant SARS-CoV-2 S ectodomain included in the fusion protein is stabilized in a prefusion conformation by one or more amino acid substitutions. In some aspects, the recombinant SARS-CoV-2 S ectodomain included in the fusion protein is stabilized in a prefusion conformation by the “6P” mutations: F817P, A892P, A899P, A942P, K986P, and V987P relative to SEQ ID NO: 1.

[0090] In some aspects, the recombinant SARS-CoV-2 S ectodomain included in the fusion protein is a single-chain SARS-CoV-2 S ectodomain including a mutation of the S1/S2 protease cleavage site to prevent cleavage and formation of distinct S1 and S2 polypeptide chains. In some aspects, the S1 and S2 polypeptides in the single chain SARS-CoV-2 S ectodomain are joined by a linker, such as a peptide linker. Examples of peptide linkers that can be used include glycine, serine, and glycine-serine linkers. In some aspects, the S1/S2 protease cleavage site is mutated by a RRAR (682-685)-to-GSAS substitution. Any of the prefusion stabilizing mutations (or combinations thereof) disclosed herein can be included in the single chain SARS-CoV-2 S ectodomain.

[0091] An exemplary sequence of a recombinant SARS-CoV-2 S protein including the 6P substitutions for prefusion stabilization for inclusion in the fusion protein is provided as SEQ ID NO: 2:

MFVFLVLLPLVSSQCVNLTTRTQLPPAYTNSFTRGVYYPDKVFRSSVLHSTQDLFLPFFSNVTWFHAIHVSG
TNGTKRFDNPVLPENDGVYFASTEKSNIIRGWIFGTTLDSKTQSLLIVNNAINVVIKVCEFQFCNDPFLGVY
YHKNNKSWMESEFRVYSSANNCTFEYVSQPFLMDLEGKQGNEKNLREFVEKNIDGYFKIYSKHTPINLVRDL
PQGESALEPLVDLPIGINITRFQTLLALHRSYLTPGDSSSGWTAGAAAYYVGYLQPRTELLKYNENGTITDA
VDCALDPLSETKCTLKSFTVEKGIYQTSNERVQPTESIVREPNIINLCPFGEVENATRFASVYAWNRKRISN
CVADYSVLYNSASFSTFKCYGVSPTKLNDLCFINVYADSFVIRGDEVRQIAPGQTGKIADYNYKLPDDETGC
VIAWNSNNLDSKVGGNYNYLYRLERKSNLKPFERDISTEIYQAGSTPCNGVEGENCYFPLQSYGFQPINGVG
YQPYRVVVLSFELLHAPATVCGPKKSTNLVKNKCVNFNENGLIGIGVLIESNKKELPFQQFGRDIADTTDAV
RDPQTLEILDITPCSFGGVSVITPGINTSNQVAVLYQDVNCTEVPVAIHADQLTPTWRVYSTGSNVFQTRAG
CLIGAEHVNNSYECDIPIGAGICASYQTQTNSPRRARSVASQSIIAYTMSLGAENSVAYSNNSIAIPINFTI
SVTTEILPVSMTKTSVDCTMYICGDSTECSNLLLQYGSFCTQLNRALTGIAVEQDKNTQEVFAQVKQIYKTP
PIKDFGGFNFSQILPDPSKPSKRSPIEDLLENKVTLADAGFIKQYGDCLGDIAARDLICAQKENGLIVLPPL
LIDEMIAQYTSALLAGTITSGWTFGAGPALQIPFPMQMAYRENGIGVTQNVLYENQKLIANQFNSAIGKIQD
SLSSTPSALGKLQDVVNQNAQALNTLVKQLSSNFGAISSVLNDILSRLDPPEAEVQIDRLITGRLQSLQTYV
TQQLIRAAEIRASANLAATKMSECVLGQSKRVDFCGKGYHLMSFPQSAPHGVVFLHVTYVPAQEKNETTAPA
ICHDGKAHFPREGVFVSNGTHWFVTQRNFYEPQIITTDNTFVSGNCDVVIGIVNNTVYDPLQPELDSFKEEL
DKYFKNHTSPDVDLGDISGINASVVNIQKEIDRLNEVAKNLNESLIDLQELGKYEQYIKWPWYIWLGFIAGL
IAIVMVTIMLCCMTSCCSCLKGCCSCGSCCKEDEDDSEPVLKGVKLHYT

[0092] An exemplary sequence of a recombinant SARS-CoV-2 S protein including the 6P substitutions for prefusion stabilization and a RRAR (682-685)-to-GSAS substitution for removal of the S1/S2 protease cleavage site for inclusion in the fusion protein is provided as SEQ ID NO: 3:

MFVFLVLLPLVSSQCVNLITRTQLPPAYTNSFTRGVYYPDKVFRSSVLHSTQDLFLPFFSNVTWFHAIHVSG
TNGTKRFDNPVLPENDGVYFASTEKSNIIRGWIFGTTLDSKTQSLLIVNNAINVVIKVCEFQFCNDPFLGVY
YHKNNKSWMESEFRVYSSANNCTFEYVSQPFLMDLEGKQGNEKNLREFVEKNIDGYFKIYSKHTPINLVRDL
PQGFSALEPLVDLPIGINITRFQTLLALHRSYLTPGDSSSGWTAGAAAYYVGYLQPRTELLKYNENGTITDA
VDCALDPLSETKCTLKSFTVEKGIYQTSNERVQPTESIVREPNIINLCPFGEVENATRFASVYAWNRKRISN
CVADYSVLYNSASFSTFKCYGVSPTKLNDLCFTNVYADSFVIRGDEVRQIAPGQTGKIADYNYKLPDDETGC
VIAWNSNNLDSKVGGNYNYLYRLERKSNLKPFERDISTEIYQAGSTPCNGVEGENCYFPLQSYGFQPINGVG
YQPYRVVVLSFELLHAPATVCGPKKSTNLVKNKCVNFNFNGLIGTGVLTESNKKFLPFQQFGRDIADTTDAV
RDPQTLEILDITPCSFGGVSVITPGINTSNQVAVLYQDVNCTEVPVAIHADQLTPTWRVYSTGSNVFQTRAG
CLIGAEHVNNSYECDIPIGAGICASYQTQTNSPGSASSVASQSIIAYTMSLGAENSVAYSNNSIAIPTNFTI
SVTTEILPVSMTKTSVDCTMYICGDSTECSNLLLQYGSFCTQLNRALTGIAVEQDKNTQEVFAQVKQIYKTP
PIKDFGGFNFSQILPDPSKPSKRSPIEDLLENKVTLADAGFIKQYGDCLGDIAARDLICAQKENGLTVLPPL
LTDEMIAQYTSALLAGTITSGWTFGAGPALQIPFPMQMAYRENGIGVTQNVLYENQKLIANQFNSAIGKIQD
SLSSTPSALGKLQDVVNQNAQALNTLVKQLSSNEGAISSVLNDILSRLDPPEAEVQIDRLITGRLQSLQTYV
TQQLIRAAEIRASANLAATKMSECVLGQSKRVDFCGKGYHLMSFPQSAPHGVVFLHVTYVPAQEKNFTTAPA
ICHDGKAHFPREGVFVSNGTHWFVTQRNFYEPQIITTDNTFVSGNCDVVIGIVNNTVYDPLQPELDSFKEEL
DKYFKNHTSPDVDLGDISGINASVVNIQKEIDRLNEVAKNLNESLIDLQELGKYEQYIKWPWYIWLGFIAGL
IAIVMVTIMLCCMTSCCSCLKGCCSCGSCCKFDEDDSEPVLKGVKLHYT

[0093] In some aspects, the recombinant SARS-CoV-2 S ectodomain included in the fusion protein is a spike protein ectodomain from a SARS-CoV-2 variant, such as the ‘delta’ variant, that has been modified to include the 6P substation and/or a modification to remove the S1/S2 protease cleavage site (such as RRAR (682-685)-to-GSAS). For example, the recombinant SARS-CoV-2 S ectodomain included in the fusion protein may include substitutions relative to SEQ ID NO: 1 that are present in variant spike protein sequences, such as K417N, L452R, T478K, E484K, E484Q, N501Y, and/or P681R substitutions. In some aspects, the recombinant SARS-CoV-2 S ectodomain included in the fusion protein comprises an N501Y substitution, a E484K substitution, N501Y, K417N, and E484K substitutions, L452R, T478K, and P681R substitutions, or L452R, E484Q, and P681R substitutions.

[0094] In some aspects, the recombinant SARS-CoV-2 S ectodomain included in the fusion protein comprises F817P, A892P, A899P, A942P, K986P, and V987P substitutions (numbering with reference to SEQ ID NO: 1) and an amino acid sequence at least 90% (such as at least 95%, at least 96%, at least 97%, at least 98%, or at least 99%) identical to residues 14-1206 of SEQ ID NO: 3. In some aspects, the recombinant SARS-CoV-2 S ectodomain included in the fusion protein comprises or consists of residues 14-1206 of SEQ ID NO: 3.

[0095] In some aspects, the recombinant SARS-CoV-2 S ectodomain included in the fusion protein comprises F817P, A892P, A899P, A942P, K986P, V987P, and RRAR (682-685)-to-GSAS substitutions (numbering with reference to SEQ ID NO: 1) and an amino acid sequence at least 90% (such as at least 95%, at least 96%, at least 97%, at least 98%, or at least 99%) identical to residues 14-1206 of SEQ ID NO: 3. In some aspects, the recombinant SARS-CoV-2 S ectodomain included in the fusion protein comprises or consists of residues 14-1206 of SEQ ID NO: 3.

[0096] Exemplary sequences of additional recombinant SARS-CoV-2 S proteins including the 6P substitutions, and a RRAR (682-685)-to-GSAS substitution for removal of the S1/S2 protease cleavage site for inclusion in the fusion protein are provided as SEQ ID NOs: 19-44:

>B.1.617.2 (Based on GISAID ID: EPI_ISL_2020950),
SEQ ID NO: 19
MFVFLVLLPLVSSQCVNLRTRTQLPPAYTNSFTRGVYYPDKVFRSSVLHSTQDLFLPFFSNVTWFHAIHVSGTNGTKRFD
NPVLPFNDGVYFASTEKSNIIRGWIFGTTLDSKTQSLLIVNNATNVVIKVCEFQFCNDPFLDVYYHKNNKSWMESGVYSS
ANNCTFEYVSQPFLMDLEGKQGNFKNLREFVFKNIDGYFKIYSKHTPINLVRDLPQGFSALEPLVDLPIGINITRFQTLL
ALHRSYLTPGDSSSGWTAGAAAYYVGYLQPRTFLLKYNENGTITDAVDCALDPLSETKCTLKSFTVEKGIYQTSNERVQP
TESIVRFPNITNLCPFGEVENATRFASVYAWNRKRISNCVADYSVLYNSASFSTFKCYGVSPTKLNDLCFTNVYADSFVI
RGDEVRQIAPGQTGKIADYNYKLPDDFTGCVIAWNSNNLDSKVGGNYNYRYRLFRKSNLKPFERDISTEIYQAGSKPCNG
VEGFNCYFPLQSYGFQPTNGVGYQPYRVVVLSFELLHAPATVCGPKKSTNLVKNKCVNFNFNGLTGTGVLTESNKKFLPF
QQFGRDIADTTDAVRDPQTLEILDITPCSFGGVSVITPGTNTSNQVAVLYQGVNCTEVPVAIHADQLTPTWRVYSTGSNV
FQTRAGCLIGAEHVNNSYECDIPIGAGICASYQTQTNSRGSASSVASQSIIAYTMSLGAENSVAYSNNSIAIPTNFTISV
TTEILPVSMTKTSVDCTMYICGDSTECSNLLLQYGSFCTQLNRALTGIAVEQDKNTQEVFAQVKQIYKTPPIKDEGGENF
SQILPDPSKPSKRSPIEDLLENKVTLADAGFIKQYGDCLGDIAARDLICAQKENGLTVLPPLLTDEMIAQYTSALLAGTI
TSGWTFGAGPALQIPFPMQMAYRENGIGVTQNVLYENQKLIANQFNSAIGKIQDSLSSTPSALGKLQNVVNQNAQALNTL
VKQLSSNFGAISSVLNDILSRLDPPEAEVQIDRLITGRLQSLQTYVTQQLIRAAEIRASANLAATKMSECVLGQSKRVDF
CGKGYHLMSFPQSAPHGVVFLHVTYVPAQEKNFTTAPAICHDGKAHFPREGVFVSNGTHWFVTQRNFYEPQIITTDNTFV
SGNCDVVIGIVNNTVYDPLQPELDSFKEELDKYFKNHTSPDVDLGDISGINASVVNIQKEIDRLNEVAKNLNESLIDLQE
LGKYEQYIKWPWYIWLGFIAGLIAIVMVTIMLCCMTSCCSCLKGCCSCGSCCKFDEDDSEPVLKGVKLHYT
>B.1.617.2 (Based on CDC website on Aug. 31, 2021),
SEQ ID NO: 20
MFVFLVLLPLVSSQCVNLRTRTQLPPAYTNSFTRGVYYPDKVFRSSVLHSTQDLFLPFFSNVTWFHAIHFSGTNGTKRED
NPVLPFNDGVYFASIEKSNIIRGWIFGTTLDSKTQSLLIVNNATNVVIKVCEFQFCNDPFLDVYYHKNNKSWMESGVYSS
ANNCTFEYVSQPFLMDLEGKQGNFKNLREFVFKNIDGYFKIYSKHTPINLVRDLPQGFSVLEPLVDLPIGINITRFQTLL
ALHRSYLTPGDSSSGLTAGAAAYYVGYLQPRTFLLKYNENGTITDAVDCALDPLSETKCTLKSFTVEKGIYQTSNERVQP
TESIVRFPNITNLCPFGEVENATRFASVYAWNRKRISNCVADYSVLYNSASFSTFKCYGVSPTKLNDLCFTNVYADSFVI
RGDEVRQIAPGQTGNIADYNYKLPDDFTGCVIAWNSNNLDSKVGGNYNYRYRLFRKSNLKPFERDISTEIYQAGSKPCNG
VEGFNCYFPLQSYGFQPTNGVGYQPYRVVVLSFELLHAPATVCGPKKSTNLVKNKCVNFNFNGLIGTGVLTESNKKELPF
QQFGRDIADTTDAVRDPQTLEILDITPCSFGGVSVITPGTNTSNQVAVLYQGVNCTEVPVAIHADQLTPTWRVYSTGSNV
FQTRAGCLIGAEHVNNSYECDIPIGAGICASYQTQTNSRGSASSVASQSIIAYTMSLGAENSVAYSNNSIAIPTNFTISV
TTEILPVSMTKTSVDCTMYICGDSTECSNLLLQYGSFCTQLNRALTGIAVEQDKNTQEVFAQVKQIYKTPPIKDEGGENF
SQILPDPSKPSKRSPIEDLLENKVTLADAGFIKQYGDCLGDIAARDLICAQKENGLTVLPPLLTDEMIAQYTSALLAGTI
TSGWTFGAGPALQIPFPMQMAYRFNGIGVTQNVLYENQKLIANQFNSAIGKIQDSLSSTPSALGKLQNVVNQNAQALNTL
VKQLSSNFGAISSVLNDILSRLDPPEAEVQIDRLITGRLQSLQTYVTQQLIRAAEIRASANLAATKMSECVLGQSKRVDF
CGKGYHLMSFPQSAPHGVVFLHVTYVPAQEKNFTTAPAICHDGKAHFPREGVFVSNGTHWEVTQRNFYEPQIITTDNTFV
SGNCDVVIGIVNNTVYDPLQPELDSFKEELDKYFKNHTSPDVDLGDISGINASVVNIQKEIDRLNEVAKNLNESLIDLQE
LGKYEQYIKWPWYIWLGFIAGLIAIVMVTIMLCCMTSCCSCLKGCCSCGSCCKFDEDDSEPVLKGVKLHYT
>B.1.1.7 (Based on GISAID ID: EPI_ISL_629440),
SEQ ID NO: 21
MFVFLVLLPLVSSQCVNLTTRTQLPPAYTNSFTRGVYYPDKVFRSSVLHSTQDLFLPFFSNVTWFHAISGTNGTKRFDNP
VLPFNDGVYFASTEKSNIIRGWIFGTTLDSKTQSLLIVNNATNVVIKVCEFQFCNDPFLGVYHKNNKSWMESEFRVYSSA
NNCTFEYVSQPFLMDLEGKQGNFKNLREFVFKNIDGYFKIYSKHTPINLVRDLPQGFSALEPLVDLPIGINITRFQTLLA
LHRSYLTPGDSSSGWTAGAAAYYVGYLQPRTFLLKYNENGTITDAVDCALDPLSETKCTLKSFTVEKGIYQTSNERVQPT
ESIVRFPNITNLCPFGEVENATRFASVYAWNRKRISNCVADYSVLYNSASFSTFKCYGVSPTKLNDLCFTNVYADSFVIR
GDEVRQIAPGQTGKIADYNYKLPDDFTGCVIAWNSNNLDSKVGGNYNYLYRLFRKSNLKPFERDISTEIYQAGSTPCNGV
EGFNCYFPLQSYGFQPTYGVGYQPYRVVVLSFELLHAPATVCGPKKSTNLVKNKCVNFNFNGLTGTGVLTESNKKELPFQ
QFGRDIDDTTDAVRDPQTLEILDITPCSFGGVSVITPGTNTSNQVAVLYQGVNCTEVPVAIHADQLTPTWRVYSTGSNVF
QTRAGCLIGAEHVNNSYECDIPIGAGICASYQTQTNSHGSASSVASQSIIAYTMSLGAENSVAYSNNSIAIPINFTISVT
TEILPVSMTKTSVDCTMYICGDSTECSNLLLQYGSFCTQLNRALTGIAVEQDKNTQEVFAQVKQIYKTPPIKDFGGFNFS
QILPDPSKPSKRSPIEDLLFNKVTLADAGFIKQYGDCLGDIAARDLICAQKFNGLTVLPPLLTDEMIAQYTSALLAGTIT
SGWTFGAGPALQIPFPMQMAYRENGIGVTQNVLYENQKLIANQFNSAIGKIQDSLSSTPSALGKLQDVVNQNAQALNTLV
KQLSSNFGAISSVLNDILARLDPPEAEVQIDRLITGRLQSLQTYVTQQLIRAAEIRASANLAATKMSECVLGQSKRVDFC
GKGYHLMSFPQSAPHGVVFLHVTYVPAQEKNFTTAPAICHDGKAHFPREGVFVSNGTHWFVTQRNFYEPQIITTHNTFVS
GNCDVVIGIVNNTVYDPLQPELDSFKEELDKYFKNHTSPDVDLGDISGINASVVNIQKEIDRLNEVAKNLNESLIDLQEL
GKYEQYIKWPWYIWLGFIAGLIAIVMVTIMLCCMTSCCSCLKGCCSCGSCCKFDEDDSEPVLKGVKLHYT
>B.1.1.7 (Based on CDC website on 08/31/2021),
SEQ ID NO: 22
MFVFLVLLPLVSSQCVNLTTRTQLPPAYTNSFTRGVYYPDKVFRSSVLHSTQDLFLPFFSNVTWFHAISGTNGTKRFDNP
VLPFNDGVYFASTEKSNIIRGWIFGTTLDSKTQSLLIVNNATNVVIKVCEFQFCNDPFLGVYHKNNKSWMESEFRVYSSA
NNCTFEYVSQPFLMDLEGKQGNFKNLREFVEKNIDGYFKIYSKHTPINLVRDLPQGFSALEPLVDLPIGINITRFQTLLA
LHRSYLTPGDSSSGWTAGAAAYYVGYLQPRTFLLKYNENGTITDAVDCALDPLSETKCTLKSFTVEKGIYQTSNERVQPT
ESIVRFPNITNLCPFGEVENATRFASVYAWNRKRISNCVADYSVLYNSASFSTFKCYGVSPTKLNDLCFTNVYADSFVIR
GDEVRQIAPGQTGKIADYNYKLPDDFTGCVIAWNSNNLDSKVGGNYNYLYRLFRKSNLKPFERDISTEIYQAGSTPCNGV
KGFNCYFPLQPYGFQPTYGVGYQPYRVVVLSFELLHAPATVCGPKKSTNLVKNKCVNFNFNGLTGTGVLTESNKKELPFQ
QFGRDIDDTTDAVRDPQTLEILDITPCSFGGVSVITPGTNTSNQVAVLYQGVNCTEVPVAIHADQLTPTWRVYSTGSNVE
QTRAGCLIGAEHVNNSYECDIPIGAGICASYQTQTNSHGSASSVASQSIIAYTMSLGAENSVAYSNNSIAIPINFTISVT
TEILPVSMTKTSVDCTMYICGDSTECSNLLLQYGSFCTQLNRALTGIAVEQDKNTQEVFAQVKQTYKTPPIKDFGGENES
QILPDPSKPSKRSPIEDLLFNKVTLADAGFIKQYGDCLGDIAARDLICAQKFNGLTVLPPLLTDEMIAQYTSALLAGTIT
SGWTFGAGPALQIPFPMQMAYRFNGIGVTQNVLYENQKLIANQFNSAIGKIQDSLSSTPSALGKLQDVVNQNAQALNTLV
KQLSSNFGAISSVLNDILARLDPPEAEVQIDRLITGRLQSLQTYVTQQLIRAAEIRASANLAATKMSECVLGQSKRVDFC
GKGYHLMSFPQSAPHGVVFLHVTYVPAQEKNFTTAPAICHDGKAHFPREGVFVSNGTHWFVTQRNFYEPQIITTHNTFVS
GNCDVVIGIVNNTVYDPLQPELDSFKEELDKYFKNHTSPDVDLGDISGINASVVNIQKEIDRLNEVANNLNESLIDLQEL
GKYEQYIKWPWYIWLGFIAGLIAIVMVTIMLCCMTSCCSCLKGCCSCGSCCKFDEDDSEPVLKGVKLHYT
>B.1.351 (Based on GISAID ID: EPI_ISL_1120737),
SEQ ID NO: 23
MFVFLVLLPLVSSQCVNFTTRTQLPPAYTNSFTRGVYYPDKVFRSSVLHSTQDLFLPFFSNVTWFHAIHVSGTNGTKRFA
NPVLPFNDGVYFASTEKSNIIRGWIFGTTLDSKTQSLLIVNNATNVVIKVCEFQFCNDPFLGVYYHKNNKSWMESEFRVY
SSANNCTFEYVSQPFLMDLEGKQGNFKNLREFVFKNIDGYFKIYSKHTPINLVRGLPQGFSALEPLVDLPIGINITRFQT
LHRSYLTPGDSSSGWTAGAAAYYVGYLQPRTELLKYNENGTITDAVDCALDPLSETKCTLKSFTVEKGIYQTSNERVQPT
ESIVRFPNITNLCPFGEVENATRFASVYAWNRKRISNCVADYSVLYNSASFSTFKCYGVSPTKLNDLCFTNVYADSFVIR
GDEVRQIAPGQTGNIADYNYKLPDDFTGCVIAWNSNNLDSKVGGNYNYLYRLFRKSNLKPFERDISTEIYQAGSTPCNGV
KGFNCYFPLQSYGFQPTYGVGYQPYRVVVLSFELLHAPATVCGPKKSTNLVKNKCVNFNFNGLTGTGVLTESNKKELPFQ
QFGRDIADTTDAVRDPQTLEILDITPCSFGGVSVITPGTNTSNQVAVLYQGVNCTEVPVAIHADQLTPTWRVYSTGSNVE
QTRAGCLIGAEHVNNSYECDIPIGAGICASYQTQTNSPGSASSVASQSIIAYTMSLGVENSVAYSNNSIAIPTNFTISVT
TEILPVSMTKTSVDCTMYICGDSTECSNLLLQYGSFCTQLNRALTGIAVEQDKNTQEVFAQVKQIYKTPPIKDFGGFNFS
QILPDPSKPSKRSPIEDLLFNKVTLADAGFIKQYGDCLGDIAARDLICAQKFNGLTVLPPLLTDEMIAQYTSALLAGTIT
SGWTFGAGPALQIPFPMQMAYRFNGIGVTQNVLYENQKLIANQFNSAIGKIQDSLSSTPSALGKLQDVVNQNAQALNTLV
KQLSSNFGAISSVLNDILSRLDPPEAEVQIDRLITGRLQSLQTYVTQQLIRAAEIRASANLAATKMSECVLGQSKRVDFC
GKGYHLMSFPQSAPHGVVFLHVTYVPAQEKNFTTAPAICHDGKAHFPREGVFVSNGTHWFVTQRNFYEPQIITTDNTFVS
GNCDVVIGIVNNTVYDPLQPELDSFKEELDKYFKNHTSPDVDLGDISGINASVVNIQKEIDRLNEVAKNLNESLIDLQEL
GKYEQYIKWPWYIWLGFIAGLIAIVMVTIMLCCMTSCCSCLKGCCSCGSCCKFDEDDSEPVLKGVKLHYT
>P.1 (Based on GISAID ID: EPI_ISL_833171),
SEQ ID NO: 24
MFVFLVLLPLVSSQCVNFTNRTQLPSAYTNSFTRGVYYPDKVFRSSVLHSTQDLFLPFFSNVTWFHAIHVSGTNGTKRED
NPVLPFNDGVYFASTEKSNIIRGWIFGTTLDSKTQSLLIVNNATNVVIKVCEFQFCNYPFLGVYYHKNNKSWMESEFRVY
SSANNCTFEYVSQPFLMDLEGKQGNFKNLSEFVFKNIDGYFKIYSKHTPINLVRDLPQGFSALEPLVDLPIGINITRFQT
LLALHRSYLTPGDSSSGWTAGAAAYYVGYLQPRTFLLKYNENGTITDAVDCALDPLSETKCTLKSFTVEKGIYQTSNFRV
QPTESIVRFPNITNLCPFGEVENATRFASVYAWNRKRISNCVADYSVLYNSASFSTFKCYGVSPTKLNDLCFTNVYADSF
VIRGDEVRQIAPGQTGTIADYNYKLPDDFTGCVIAWNSNNLDSKVGGNYNYLYRLFRKSNLKPFERDISTEIYQAGSTPC
NGVKGFNCYFPLQSYGFQPTYGVGYQPYRVVVLSFELLHAPATVCGPKKSTNLVKNKCVNFNFNGLTGTGVLTESNKKFL
PFQQFGRDIADTTDAVRDPQTLEILDITPCSFGGVSVITPGTNTSNQVAVLYQGVNCTEVPVAIHADQLTPTWRVYSTGS
NVFQTRAGCLIGAEYVNNSYECDIPIGAGICASYQTQTNSPGSASSVASQSIIAYTMSLGAENSVAYSNNSIAIPTNFTI
SVTTEILPVSMTKTSVDCTMYICGDSTECSNLLLQYGSFCTQLNRALTGIAVEQDKNTQEVFAQVKQIYKTPPIKDFGGF
NFSQILPDPSKPSKRSPIEDLLFNKVTLADAGFIKQYGDCLGDIAARDLICAQKFNGLTVLPPLLTDEMIAQYTSALLAG
TITSGWTFGAGPALQIPFPMQMAYRFNGIGVTQNVLYENQKLIANQFNSAIGKIQDSLSSTPSALGKLQDVVNQNAQALN
TLVKQLSSNFGAISSVLNDILSRLDPPEAEVQIDRLITGRLQSLQTYVTQQLIRAAEIRASANLAAIKMSECVLGQSKRV
DFCGKGYHLMSFPQSAPHGVVFLHVTYVPAQEKNFTTAPAICHDGKAHFPREGVFVSNGTHWFVTQRNFYEPQIITTDNT
FVSGNCDVVIGIVNNTVYDPLQPELDSFKEELDKYFKNHTSPDVDLGDISGINASFVNIQKEIDRLNEVAKNLNESLIDL
QELGKYEQYIKWPWYIWLGFIAGLIAIVMVTIMLCCMTSCCSCLKGCCSCGSCCKFDEDDSEPVLKGVKLHYT
>B.1.617.1 (Based on GISAID ID: EPI_ISL_1384866),
SEQ ID NO: 25
MFVFLVLLPLVSSQCVNLTTRTQLPPAYTNSFTRGVYYPDKVFRSSVLHSTQDLFLPFFSNVTWFHAIHVSGTNGTKRED
NPVLPFNDGVYFASIEKSNIIRGWIFGTTLDSKTQSLLIVNNATNVVIKVCEFQFCNDPFLDVYYHKNNKSWMKSEFRVY
SSANNCTFEYVSQPFLMDLEGKQGNFKNLREFVFKNIDGYFKIYSKHTPINLVRDLPQGFSALEPLVDLPIGINITRFQT
LLALHRSYLTPGDSSSGWTAGAAAYYVGYLQPRTFLLKYNENGTITDAVDCALDPLSETKCTLKSFTVEKGIYQTSNERV
QPTESIVRFPNITNLCPFGEVENATRFASVYAWNRKRISNCVADYSVLYNSASFSTFKCYGVSPTKLNDLCFTNVYADSF
VIRGDEVRQIAPGQTGKIADYNYKLPDDFTGCVIAWNSNNLDSKVGGNYNYRYRLFRKSNLKPFERDISTEIYQAGSTPC
NGVQGFNCYFPLQSYGFQPTNGVGYQPYRVVVLSFELLHAPATVCGPKKSTNLVKNKCVNFNFNGLTGTGVLTESNKKEL
PFQQFGRDIADTTDAVRDPQTLEILDITPCSFGGVSVITPGTNTSNQVAVLYQGVNCTEVPVAIHADQLTPTWRVYSTGS
NVFQTRAGCLIGAEHVNNSYECDIPIGAGICASYQTQTNSRGSASSVASQSIIAYTMSLGAENSVAYSNNSIAIPTNFTI
SVTTEILPVSMTKTSVDCTMYICGDSTECSNLLLQYGSFCTQLNRALTGIAVEQDKNTQEVFAQVKQIYKTPPIKDFGGF
NFSQILPDPSKPSKRSPIEDLLENKVTLADAGFIKQYGDCLGDIAARDLICAQKENGLTVLPPLLTDEMIAQYTSALLAG
TITSGWTFGAGPALQIPFPMQMAYRENGIGVTQNVLYENQKLIANQFNSAIGKIQDSLSSTPSALGKLQDVVNQNAQALN
TLVKQLSSNFGAISSVLNDILSRLDPPEAEVQIDRLITGRLQSLQTYVTQQLIRAAEIRASANLAATKMSECVLGQSKRV
DFCGKGYHLMSFPQSAPHGVVFLHVTYVPAHEKNFTTAPAICHDGKAHFPREGVFVSNGTHWFVTQRNFYEPQIITTDNT
FVSGNCDVVIGIVNNTVYDPLQPELDSFKEELDKYFKNHTSPDVDLGDISGINASVVNIQKEIDRLNEVAKNLNESLIDL
QELGKYEQYIKWPWYIWLGFIAGLIAIVMVTIMLCCMTSCCSCLKGCCSCGSCCKFDEDDSEPVLKGVKLHYT
>C.37-1 (Based on GISAID ID: EPI_ISL_1138413),
SEQ ID NO: 26
MFVFLVLLPLVSSQCVNLTTRTQLPPAYTNSFTRGVYYPDKVFRSSVLHSTQDLFLPFFSNVTWFHAIHVSGTNVIKRED
NPVLPFNDGVYFASTEKSNIIRGWIFGTTLDSKTQSLLIVNNATNVVIKVCEFQFCNDPFLGVYYHKNNKSWMESEFRVY
SSANNCTFEYVSQPFLMDLEGKQGNFKNLREFVFKNIDGYFKIYSKHTPINLVRDLPQGFSALEPLVDLPIGINITRFQT
LLALHNSSSGWTAGAAAYYVGYLQPRTELLKYNENGTITDAVDCALDPLSETKCTLKSFTVEKGIYQTSNERVQPTESIV
RFPNITNLCPFGEVENATRFASVYAWNRKRISNCVADYSVLYNSASFSTFKCYGVSPTKLNDLCFTNVYADSFVIRGDEV
RQIAPGQTGKIADYNYKLPDDFTGCVIAWNSNNLDSKVGGNYNYQYRLERKSNLKPFERDISTEIYQAGSTPCNGVEGEN
CYSPLQSYGFQPTNGVGYQPYRVVVLSFELLHAPATVCGPKKSTNLVKNKCVNFNFNGLTGTGVLTESNKKELPFQQFGR
DIADTTDAVRDPQTLEILDITPCSFGGVSVITPGTNTSNQVAVLYQGVNCTEVPVAIHADQLTPTWRVYSTGSNVFQTRA
GCLIGAEHVNNSYECDIPIGAGICASYQTQTNSPGSASSVASQSIIAYTMSLGAENSVAYSNNSIAIPTNFTISVTTEIL
PVSMTKTSVDCTMYICGDSTECSNLLLQYGSFCTQLNRALTGIAVEQDKNTQEVFAQVKQIYKTPPIKDFGGFNFSQILP
DPSKPSKRSPIEDLLFNKVTLADAGFIKQYGDCLGDIAARDLICAQKFNGLNVLPPLLTDEMIAQYTSALLAGTITSGWT
FGAGPALQIPFPMQMAYRENGIGVTQNVLYENQKLIANQFNSAIGKIQDSLSSTPSALGKLQDVVNQNAQALNTLVKQLS
SNFGAISSVLNDILSRLDPPEAEVQIDRLITGRLQSLQTYVTQQLIRAAEIRASANLAATKMSECVLGQSKRVDFCGKGY
HLMSFPQSAPHGVVFLHVTYVPAQEKNFTTAPAICHDGKAHFPREGVFVSNGTHWFVTQRNFYEPQIITTDNTFVSGNCD
VVIGIVNNTVYDPLQPELDSFKEELDKYFKNHTSPDVDLGDISGINASVVNIQKEIDRLNEVAKNLNESLIDLQELGKYE
QYIKWPWYIWLGFIAGLIAIVMVTIMLCCMTSCCSCLKGCCSCGSCCKFDEDDSEPVLKGVKLHYT
>C.37-2 (Based on GISAID ID: EPI_ISL_1138413),
SEQ ID NO: 27
MFVFLVLLPLVSSQCVNLTTRTQLPPAYTNSFTRGVYYPDKVFRSSVLHSTQDLFLPFFSNVTWFHAIHVSGTNVIKRFD
NPVLPFNDGVYFASTEKSNIIRGWIFGTTLDSKTQSLLIVNNATNVVIKVCEFQFCNDPFLGVYYHKNNKSWMESEFRVY
SSANNCTFEYVSQPFLMDLEGKQGNFKNLREFVFKNIDGYFKIYSKHTPINLVRDLPQGFSALEPLVDLPIGINITRFQT
LLALHSSSGWTAGAAAYYVGYLQPRTFLLKYNENGTITDAVDCALDPLSETKCTLKSFTVEKGIYQTSNERVQPTESIVR
FPNITNLCPFGEVENATRFASVYAWNRKRISNCVADYSVLYNSASFSTFKCYGVSPTKLNDLCFINVYADSFVIRGDEVR
QIAPGQTGKIADYNYKLPDDFTGCVIAWNSNNLDSKVGGNYNYQYRLFRKSNLKPFERDISTEIYQAGSTPCNGVEGENC
YSPLQSYGFQPTNGVGYQPYRVVVLSFELLHAPATVCGPKKSTNLVKNKCVNFNFNGLTGTGVLTESNKKFLPFQQFGRD
IADTTDAVRDPQTLEILDITPCSFGGVSVITPGTNTSNQVAVLYQGVNCTEVPVAIHADQLTPTWRVYSTGSNVFQTRAG
CLIGAEHVNNSYECDIPIGAGICASYQTQTNSPGSASSVASQSIIAYTMSLGAENSVAYSNNSIAIPTNFTISVTTEILP
VSMTKTSVDCTMYICGDSTECSNLLLQYGSFCTQLNRALTGIAVEQDKNTQEVFAQVKQIYKTPPIKDFGGFNFSQILPD
PSKPSKRSPIEDLLENKVTLADAGFIKQYGDCLGDIAARDLICAQKENGLNVLPPLLTDEMIAQYTSALLAGTITSGWTF
GAGPALQIPFPMQMAYRENGIGVTQNVLYENQKLIANQFNSAIGKIQDSLSSTPSALGKLQDVVNQNAQALNTLVKQLSS
NFGAISSVLNDILSRLDPPEAEVQIDRLITGRLQSLQTYVTQQLIRAAEIRASANLAATKMSECVLGQSKRVDFCGKGYH
LMSFPQSAPHGVVFLHVTYVPAQEKNFTTAPAICHDGKAHFPREGVFVSNGTHWFVTQRNFYEPQIITTDNTFVSGNCDV
VIGIVNNTVYDPLQPELDSFKEELDKYFKNHTSPDVDLGDISGINASVVNIQKEIDRLNEVAKNLNESLIDLQELGKYEQ
YIKWPWYIWLGFIAGLIAIVMVTIMLCCMTSCCSCLKGCCSCGSCCKFDEDDSEPVLKGVKLHYT
>R.1 (Based on GISAID ID: EPI_ISL_1123466),
SEQ ID NO: 28
MFVFLVLLPLVSSQCVNLTTRTQLPPAYTNSFTRGVYYPDKVFRSSVLHSTQDLFLPFFSNVTWFHAIHVSGTNGTKRED
NPVLPFNDGVYFASTEKSNIIRGWIFGTTLDSKTQSLLIVNNATNVVIKVCEFQFCNDPFLGVYYHKNNKSLMESEFRVY
SSANNCTFEYVSQPFLMDLEGKQGNFKNLREFVFKNIDGYFKIYSKHTPINLVRDLPQGFSALEPLVDLPIGINITRFQT
LLALHRSYLTPGDSSSGWTAGAAAYYVGYLQPRTELLKYNENGTITDAVDCALDPLSETKCTLKSFTVEKGIYQTSNERV
QPTESIVRFPNITNLCPFGEVENATRFASVYAWNRKRISNCVADYSVLYNSASFSTFKCYGVSPTKLNDLCFTNVYADSF
VIRGDEVRQIAPGQTGKIADYNYKLPDDFTGCVIAWNSNNLDSKVGGNYNYLYRLFRKSNLKPFERDISTEIYQAGSTPC
NGVKGFNCYFPLQSYGFQPTNGVGYQPYRVVVLSFELLHAPATVCGPKKSTNLVKNKCVNFNFNGLTGTGVLTESNKKEL
PFQQFGRDIADTTDAVRDPQTLEILDITPCSFGGVSVITPGTNTSNQVAVLYQGVNCTEVPVAIHADQLTPTWRVYSTGS
NVFQTRAGCLIGAEHVNNSYECDIPIGAGICASYQTQTNSPGSASSVASQSIIAYTMSLGAENSVAYSNNSIAIPTNFTI
SVTTEILPVSMTKTSVDCTMYICGDSTECSNLLLQYGSFCTQLNRALTVIAVEQDKNTQEVFAQVKQIYKTPPIKDFGGF
NFSQILPDPSKPSKRSPIEDLLFNKVTLADAGFIKQYGDCLGDIAARDLICAQKFNGLTVLPPLLTDEMIAQYTSALLAG
TITSGWTFGAGPALQIPFPMQMAYRFNGIGVTQNVLYENQKLIANQFNSAIGKIQDSLSSTPSALGKLQDVVNQNAQALN
TLVKQLSSNFGAISSVLNDILSRLDPPEAEVQIDRLITGRLQSLQTYVTQQLIRAAEIRASANLAATKMSECVLGQSKRV
DFCGKGYHLMSFPQSAPHGVVFLHVTYVPAQEKNFTTAPAICHDGKAHFPREGVFVSNGTHWFVTQRNFYEPQIITTDNT
FVSGNCDVVIGIVNNTVYDPLQPELDSFKEELDKYFKNHTSPDVDLGDISGINASVVNIQKEIDRLNEVAKNLNESLIDL
QELGKYEQYIKWPWYIWLGFIAGLIAIVMVTIMLCCMTSCCSCLKGCCSCGSCCKFDEDDSEPVLKGVKLHYT
>B.1.1.519 (Based on GISAID ID: EPI_ISL_876555) ,
SEQ ID NO: 29
MFVFLVLLPLVSSQCVNLTTRTQLPPAYTNSFTRGVYYPDKVFRSSVLHSTQDLFLPFFSNVTWFHAIHVSGTNGTKRFD
NPVLPFNDGVYFASTEKSNIIRGWIFGTTLDSKTQSLLIVNNATNVVIKVCEFQFCNDPFLGVYYHKNNKSWMESEFRVY
SSANNCTFEYVSQPFLMDLEGKQGNFKNLREFVFKNIDGYFKIYSKHTPINLVRDLPQGFSALEPLVDLPIGINITRFQT
LLALHRSYLTPGDSSSGWTAGAAAYYVGYLQPRTFLLKYNENGTITDAVDCALDPLSETKCTLKSFTVEKGIYQTSNERV
QPTESIVRFPNITNLCPFGEVENATRFASVYAWNRKRISNCVADYSVLYNSASFSTFKCYGVSPTKLNDLCFTNVYADSF
VIRGDEVRQIAPGQTGKIADYNYKLPDDFTGCVIAWNSNNLDSKVGGNYNYLYRLFRKSNLKPFERDISTEIYQAGSKPC
NGVEGFNCYFPLQSYGFQPTNGVGYQPYRVVVLSFELLHAPATVCGPKKSTNLVKNKCVNFNFNGLTGTGVLTESNKKEL
PFQQFGRDIADTTDAVRDPQTLEILDITPCSFGGVSVITPGTNTSNQVAVLYQGVNCTEVPVAIHADQLTPTWRVYSTGS
NVFQTRAGCLIGAEHVNNSYECDIPIGAGICASYQTQTNSHGSASSVASQSIIAYTMSLGAENSVAYSNNSIAIPTNFTI
SVTTEILPVSMAKTSVDCTMYICGDSTECSNLLLQYGSFCTQLNRALTGIAVEQDKNTQEVFAQVKQIYKTPPIKDFGGF
NFSQILPDPSKPSKRSPIEDLLFNKVTLADAGFIKQYGDCLGDIAARDLICAQKFNGLTVLPPLLTDEMIAQYTSALLAG
TITSGWTFGAGPALQIPFPMQMAYRENGIGVTQNVLYENQKLIANQFNSAIGKIQDSLSSTPSALGKLQDVVNQNAQALN
TLVKQLSSNFGAISSVLNDILSRLDPPEAEVQIDRLITGRLQSLQTYVTQQLIRAAEIRASANLAATKMSECVLGQSKRV
DFCGKGYHLMSFPQSAPHGVVFLHVTYVPAQEKNFTTAPAICHDGKAHFPREGVFVSNGTHWFVTQRNFYEPQIITTDNT
FVSGNCDVVIGIVNNTVYDPLQPELDSFKEELDKYFKNHTSPDVDLGDISGINASVVNIQKEIDRLNEVAKNLNESLIDL
QELGKYEQYIKWPWYIWLGFIAGLIAIVMVTIMLCCMTSCCSCLKGCCSCGSCCKFDEDDSEPVLKGVKLHYT
>B.1.525 (Based on GISAID ID: EPI_ISL_760883),
SEQ ID NO: 30
MFVFLVLLPLVSSQCVNLTTRTQLPPAYTNSFTRGVYYPDKVFRSSVLHSTRDLFLPFFSNVTWFHVISGTNGTKRFDNP
VLPFNDGVYFASTEKSNIIRGWIFGTTLDSKTQSLLIVNNATNVVIKVCEFQFCNDPFLGVYHKNNKSWMESEFRVYSSA
NNCTFEYVSQPFLMDLEGKQGNFKNLREFVFKNIDGYFKIYSKHTPINLVRDLPQGFSALEPLVDLPIGINITRFQTLLA
LHRSYLTPGDSSSGWTAGAAAYYVGYLQPRTELLKYNENGTITDAVDCALDPLSETKCTLKSFTVEKGIYQTSNERVQPT
ESIVRFPNITNLCPFGEVENATRFASVYAWNRKRISNCVADYSVLYNSASFSTFKCYGVSPTKLNDLCFTNVYADSFVIR
GDEVRQIAPGQTGKIADYNYKLPDDFTGCVIAWNSNNLDSKVGGNYNYLYRLFRKSNLKPFERDISTEIYQAGSTPCNGV
KGFNCYFPLQSYGFQPTNGVGYQPYRVVVLSFELLHAPATVCGPKKSTNLVKNKCVNFNFNGLTGTGVLTESNKKELPFQ
QFGRDIADTTDAVRDPQTLEILDITPCSFGGVSVITPGTNTSNQVAVLYQGVNCTEVPVAIHADQLTPTWRVYSTGSNVF
QTRAGCLIGAEHVNNSYECDIPIGAGICASYQTHINSPGSASSVASQSIIAYTMSLGAENSVAYSNNSIAIPTNFTISVT
TEILPVSMTKTSVDCTMYICGDSTECSNLLLQYGSFCTQLNRALTGIAVEQDKNTQEVFAQVKQTYKTPPIKDFGGFNFS
QILPDPSKPSKRSPIEDLLENKVTLADAGFIKQYGDCLGDIAARDLICAQKFNGLTVLPPLLTDEMIAQYTSALLAGTIT
SGWTLGAGPALQIPFPMQMAYRFNGIGVTQNVLYENQKLIANQFNSAIGKIQDSLSSTPSALGKLQDVVNQNAQALNTLV
KQLSSNFGAISSVLNDILSRLDPPEAEVQIDRLITGRLQSLQTYVTQQLIRAAEIRASANLAATKMSECVLGQSKRVDEC
GKGYHLMSFPQSAPHGVVFLHVTYVPAQEKNFTTAPAICHDGKAHFPREGVFVSNGTHWFVTQRNFYEPQIITTDNTFVS
GNCDVVIGIVNNTVYDPLQPELDSFKEELDKYFKNHTSPDVDLGDISGINASVVNIQKEIDRLNEVAKNLNESLIDLQEL
GKYEQYIKWPWYIWLGFIAGLIAIVMVTIMLCCMTSCCSCLKGCCSCGSCCKFDEDDSEPVLKGVKLHYT
>B.1.526 (Based on GISAID ID: EPI_ISL_1080798),
SEQ ID NO: 31
MFVFFVLLPLVSSQCVNLTTRTQLPPAYTNSFTRGVYYPDKVFRSSVLHSTQDLFLPFFSNVTWFHAIHVSGTNGTKRED
NPVLPFNDGVYFASIEKSNIIRGWIFGTTLDSKTQSLLIVNNATNVVIKVCEFQFCNDPFLGVYYHKNNKSWMESEFRVY
SSANNCTFEYVSQPFLMDLEGKQGNFKNLREFVFKNIDGYFKIYSKHTPINLVRDLPQGFSALEPLVDLPIGINITRFQT
LLALHRSYLTPGGSSSGWTAGAAAYYVGYLQPRTFLLKYNENGTITDAVDCALDPLSETKCTLKSFTVEKGIYQTSNERV
QPTESIVRFPNITNLCPFGEVENATRFASVYAWNRKRISNCVADYSVLYNSASFSTFKCYGVSPTKLNDLCFTNVYADSF
VIRGDEVRQIAPGQTGKIADYNYKLPDDFTGCVIAWNSNNLDSKVGGNYNYLYRLFRKSNLKPFERDISTEIYQAGSTPC
NGVKGFNCYFPLQSYGFQPTNGVGYQPYRVVVLSFELLHAPATVCGPKKSTNLVKNKCVNFNFNGLTGTGVLTESNKKEL
PFQQFGRDIADTTDAVRDPQTLEILDITPCSFGGVSVITPGTNTSNQVAVLYQGVNCTEVPVAIHADQLTPTWRVYSTGS
NVFQTRAGCLIGAEHVNNSYECDIPIGAGICASYQTQTNSPGSASSVASQSIIAYTMSLGVENSVAYSNNSIAIPTNFTI
SVTTEILPVSMTKTSVDCTMYICGDSTECSNLLLQYGSFCTQLNRALTGIAVEQDKNTQEVFAQVKQTYKTPPIKDFGGF
NFSQILPDPSKPSKRSPIEDLLFNKVTLADAGFIKQYGDCLGDIAARDLICAQKFNGLTVLPPLLTDEMIAQYTSALLAG
TITSGWTFGAGPALQIPFPMQMAYRENGIGVTQNVLYENQKLIANQFNSAIGKIQDSLSSTPSALGKLQDVVNQNAQALN
TLVKQLSSNFGAISSVLNDILSRLDPPEAEVQIDRLITGRLQSLQTYVTQQLIRAAEIRASANLAATKMSECVLGQSKRV
DFCGKGYHLMSFPQSAPHGVVFLHVTYVPAQEKNFTTAPAICHDGKAHFPREGVFVSNGTHWFVTQRNFYEPQIITTDNT
FVSGNCDVVIGIVNNTVYDPLQPELDSFKEELDKYFKNHTSPDVDLGDISGINASVVNIQKEIDRLNEVAKNLNESLIDL
QELGKYEQYIKWPWYIWLGFIAGLIAIVMVTIMLCCMTSCCSCLKGCCSCGSCCKFDEDDSEPVLKGVKLHYT
>B.1.427/429 (Based on GISAID ID: EPI_ISL_984563 (B.1.427), EPI_ISL_672374
(B.1.429)),
SEQ ID NO: 32
MFVFLVLLPLVSIQCVNLTTRTQLPPAYTNSFTRGVYYPDKVFRSSVLHSTQDLFLPFFSNVTWFHAIHVSGTNGTKRED
NPVLPFNDGVYFASTEKSNIIRGWIFGTTLDSKTQSLLIVNNATNVVIKVCEFQFCNDPFLGVYYHKNNKSCMESEFRVY
SSANNCTFEYVSQPFLMDLEGKQGNFKNLREFVFKNIDGYFKIYSKHTPINLVRDLPQGFSALEPLVDLPIGINITRFQT
LLALHRSYLTPGDSSSGWTAGAAAYYVGYLQPRTFLLKYNENGTITDAVDCALDPLSETKCTLKSFTVEKGIYQTSNERV
QPTESIVRFPNITNLCPFGEVENATRFASVYAWNRKRISNCVADYSVLYNSASFSTFKCYGVSPTKLNDLCFTNVYADSF
VIRGDEVRQIAPGQTGKIADYNYKLPDDFTGCVIAWNSNNLDSKVGGNYNYRYRLFRKSNLKPFERDISTEIYQAGSTPC
NGVEGENCYFPLQSYGFQPTNGVGYQPYRVVVLSFELLHAPATVCGPKKSTNLVKNKCVNFNFNGLTGTGVLTESNKKEL
PFQQFGRDIADTTDAVRDPQTLEILDITPCSFGGVSVITPGTNTSNQVAVLYQGVNCTEVPVAIHADQLTPTWRVYSTGS
NVFQTRAGCLIGAEHVNNSYECDIPIGAGICASYQTQTNSPGSASSVASQSIIAYTMSLGAENSVAYSNNSIAIPTNFTI
SVTTEILPVSMTKTSVDCTMYICGDSTECSNLLLQYGSFCTQLNRALTGIAVEQDKNTQEVFAQVKQIYKTPPIKDFGGF
NFSQILPDPSKPSKRSPIEDLLFNKVTLADAGFIKQYGDCLGDIAARDLICAQKENGLTVLPPLLTDEMIAQYTSALLAG
TITSGWTFGAGPALQIPFPMQMAYRFNGIGVTQNVLYENQKLIANQFNSAIGKIQDSLSSTPSALGKLQDVVNQNAQALN
TLVKQLSSNFGAISSVLNDILSRLDPPEAEVQIDRLITGRLQSLQTYVTQQLIRAAEIRASANLAATKMSECVLGQSKRV
DFCGKGYHLMSFPQSAPHGVVFLHVTYVPAQEKNFTTAPAICHDGKAHFPREGVFVSNGTHWFVTQRNFYEPQIITTDNT
FVSGNCDVVIGIVNNTVYDPLQPELDSFKEELDKYFKNHTSPDVDLGDISGINASVVNIQKEIDRLNEVAKNLNESLIDL
QELGKYEQYIKWPWYIWLGFIAGLIAIVMVTIMLCCMTSCCSCLKGCCSCGSCCKFDEDDSEPVLKGVKLHYT
>B.1.526.1 (Based on GISAID ID: EPI_ISL_896306),
SEQ ID NO: 33
MFVFLVLLPLVSSQCVNLTTRTQLPPAYTNSFTRGVYYPDKVFRSSVLHSTQDLFLPFFSNVTWFHAIHVSGTNGTKRFG
NPVLPFNDGVYFASTEKSNIIRGWIFGTTLDSKTQSLLIVNNATNVVIKVCEFQFCNDPFLGVYHKNNKSWMESESRVYS
SANNCTFEYVSQPFLMDLEGKQGNFKNLREFVFKNIDGYFKIYSKHTPINLVRDLPQGFSALEPLVDLPIGINITRFQTL
LALHRSYLTPGDSSSGWTAGAAAYYVGYLQPRTFLLKYNENGTITDAVDCALDPLSETKCTLKSFTVEKGIYQTSNERVQ
PTESIVRFPNITNLCPFGEVENATRFASVYAWNRKRISNCVADYSVLYNSASFSTFKCYGVSPTKLNDLCFTNVYADSFV
IRGDEVRQIAPGQTGKIADYNYKLPDDFTGCVIAWNSNNLDSKVGGNYNYRYRLFRKSNLKPFERDISTEIYQAGSTPCN
GVEGFNCYFPLQSYGFQPTNGVGYQPYRVVVLSFELLHAPATVCGPKKSTNLVKNKCVNFNFNGLTGTGVLTESNKKFLP
FQQFGRDIADTTDAVRDPQTLEILDITPCSFGGVSVITPGTNTSNQVAVLYQGVNCTEVPVAIHADQLTPTWRVYSTGSN
VFQTRAGCLIGAEHVNNSYECDIPIGAGICASYQTQTNSPGSASSVASQSIIAYTMSLGAENSVAYSNNSIAIPTNFTIS
VTTEILPVSMTKTSVDCTMYICGDSTECSNLLLQYGSFCTQLNRALTGIAVEQDKNTQEVFAQVKQIYKTPPIKDFGGEN
FSQILPDPSKPSKRSPIEDLLFNKVTLADAGFIKQYGDCLGDIAARDLICAQKFNGLNVLPPLLTDEMIAQYTSALLAGT
ITSGWTFGAGPALQIPFPMQMAYRENGIGVTQNVLYENQKLIANQFNSAIGKIQDSLSSTPSALGKLQHVVNQNAQALNT
LVKQLSSNFGAISSVLNDILSRLDPPEAEVQIDRLITGRLQSLQTYVTQQLIRAAEIRASANLAATKMSECVLGQSKRVD
FCGKGYHLMSFPQSAPHGVVFLHVTYVPAQEKNFTTAPAICHDGKAHFPREGVFVSNGTHWFVTQRNFYEPQIITTDNTF
VSGNCDVVIGIVNNTVYDPLQPELDSFKEELDKYFKNHTSPDVDLGDISGINASVVNIQKEIDRLNEVAKNLNESLIDLQ
ELGKYEQYIKWPWYIWLGFIAGLIAIVMVTIMLCCMTSCCSCLKGCCSCGSCCKFDEDDSEPVLKGVKLHYT
>P.2 (Based on GISAID ID: EPI_ISL_717936),
SEQ ID NO: 34
MFVFLVLLPLVSSQCVNLTTRTQLPPAYTNSFTRGVYYPDKVFRSSVLHSTQDLFLPFFSNVTWFHAIHVSGINGTKRED
NPVLPFNDGVYFASTEKSNIIRGWIFGTTLDSKTQSLLIVNNAINVVIKVCEFQFCNDPFLGVYYHKNNKSWMESEFRVY
SSANNCTFEYVSQPFLMDLEGKQGNFKNLREFVFKNIDGYFKIYSKHTPINLVRDLPQGFSALEPLVDLPIGINITRFQT
LLALHRSYLTPGDSSSGWTAGAAAYYVGYLQPRTFLLKYNENGTITDAVDCALDPLSETKCTLKSFTVEKGIYQTSNERV
QPTESIVRFPNITNLCPFGEVENATRFASVYAWNRKRISNCVADYSVLYNSASFSTFKCYGVSPTKLNDLCFTNVYADSF
VIRGDEVRQIAPGQTGKIADYNYKLPDDFTGCVIAWNSNNLDSKVGGNYNYLYRLFRKSNLKPFERDISTEIYQAGSTPC
NGVKGFNCYFPLQSYGFQPTNGVGYQPYRVVVLSFELLHAPATVCGPKKSTNLVKNKCVNFNFNGLTGTGVLTESNKKEL
PFQQFGRDIADTTDAVRDPQTLEILDITPCSFGGVSVITPGTNTSNQVAVLYQGVNCTEVPVAIHADQLTPTWRVYSTGS
NVFQTRAGCLIGAEHVNNSYECDIPIGAGICASYQTQTNSPGSASSVASQSIIAYTMSLGAENSVAYSNNSIAIPTNFTI
SVTTEILPVSMTKTSVDCTMYICGDSTECSNLLLQYGSFCTQLNRALTGIAVEQDKNTQEVFAQVKQIYKTPPIKDFGGF
NFSQILPDPSKPSKRSPIEDLLFNKVTLADAGFIKQYGDCLGDIAARDLICAQKFNGLTVLPPLLTDEMIAQYTSALLAG
TITSGWTFGAGPALQIPFPMQMAYRENGIGVTQNVLYENQKLIANQFNSAIGKIQDSLSSTPSALGKLQDVVNQNAQALN
TLVKQLSSNFGAISSVLNDILSRLDPPEAEVQIDRLITGRLQSLQTYVTQQLIRAAEIRASANLAATKMSECVLGQSKRV
DFCGKGYHLMSFPQSAPHGVVFLHVTYVPAQEKNFTTAPAICHDGKAHFPREGVFVSNGTHWFVTQRNFYEPQIITTDNT
FVSGNCDVVIGIVNNTVYDPLQPELDSFKEELDKYFKNHTSPDVDLGDISGINASFVNIQKEIDRLNEVAKNLNESLIDL
QELGKYEQYIKWPWYIWLGFIAGLIAIVMVTIMLCCMTSCCSCLKGCCSCGSCCKFDEDDSEPVLKGVKLHYT
>A.23.1 (Based on GISAID ID: EPI_ISL_1469353),
SEQ ID NO: 35
MFVFLVLLPLVSSQCVNLTTRTQLPPAYTNSFTRGVYYPDKVFRSSVLHSTQDLFLPFFSNVTWFHAIHVSGTNGTKRED
NPVLPFNDGVYFASTEKSNIIRGWIFGTTLDSKTQSLLIVNNATNVVIKVCEFQFCNDPFLGVYYHKNNKSWMESELRVY
SSANNCTFEYVSQPFLMDLEGKQGNFKNLREFVFKNIDGYFKIYSKHTPINLVRDLPQGFSALEPLVDLPIGINITRFQT
LLALHRSYLTPGDSSSGWTAGAAAYYVGYLQPRTFLLKYNENGTITDAVDCALDPLSETKCTLKSFTVEKGIYQTSNERV
QPTESIVRFPNITNLCPFGEVENATRFASVYAWNRKRISNCVADYSFLYNSASFSTFKCYGVSPTKLNDLCFTNVYADSF
VIRGDEVRQIAPGQTGKIADYNYKLPDDFTGCVIAWNSNNLDSKVGGNYNYLYRLFRKSNLKPFERDISTEIYQAGSTPC
NGVEGENCYFPLQSYGFQPTNGVGYQPYRVVVLSFELLHAPATVCGPKKSTNLVKNKCVNFNFNGLTGTGVLTESNKKEL
PFQQFGRDIADTTDAVRDPQTLEILDITPCSFGGVSVITPGTNTSNQVAVLYHGVNCTEVPVAIHADQLTPTWRVYSTGS
NVFQTRAGCLIGAEHVNNSYECDIPIGAGICASYQTQTNSRGSASSVASQSIIAYTMSLGAENSVAYSNNSIAIPTNFTI
SVTTEILPVSMTKTSVDCTMYICGDSTECSNLLLQYGSFCTQLNRALTGIAVEQDKNTQEVFAQVKQIYKTPPIKDFGGF
NFSQILPDPSKPSKRSPIEDLLFNKVTLADAGFIKQYGDCLGDIAARDLICAQKFNGLTVLPPLLTDEMIAQYTSALLAG
TITSGWTFGAGPALQIPFPMQMAYRENGIGVTQNVLYENQKLIANQFNSAIGKIQDSLSSTPSALGKLQDVVNQNAQALN
TLVKQLSSNFGAISSVLNDILSRLDPPEAEVQIDRLITGRLQSLQTYVTQQLIRAAEIRASANLAATKMSECVLGQSKRV
DFCGKGYHLMSFPQSAPHGVVFLHVTYVPAQEKNFTTAPAICHDGKAHFPREGVFVSNGTHWFVTQRNFYEPQIITTDNT
FVSGNCDVVIGIVNNTVYDPLQPELDSFKEELDKYFKNHTSPDVDLGDISGINASVVNIQKEIDRLNEVAKNLNESLIDL
QELGKYEQYIKWPWYIWLGFIAGLIAIVMVTIMLCCMTSCCSCLKGCCSCGSCCKFDEDDSEPVLKGVKLHYT
>B.1.526.2 (Based on GISAID ID: EPI_ISL_823886),
SEQ ID NO: 36
MFVFFVLLPLVSSQCVNLTTRTQLPPAYTNSFTRGVYYPDKVFRSSVLHSTQDLFLPFFSNVTWFHAIHVSGTNGTKRFD
NPVLPFNDGVYFASIEKSNIIRGWIFGTTLDSKTQSLLIVNNATNVVIKVCEFQFCNDPFLGVYYHKNNKSWMESEFRVY
SSANNCTFEYVSQPFLMDLEGKQGNFKNLREFVFKNIDGYFKIYSKHTPINLVRDLPQGFSALEPLVDLPIGINITRFQT
LLALHRSYLTPGGSSSGWTAGAAAYYVGYLQPRTFLLKYNENGTITDAVDCALDPLSETKCTLKSFTVEKGIYQTSNFRV
QPTESIVRFPNITNLCPFGEVENATRFASVYAWNRKRISNCVADYSVLYNSASFSTFKCYGVSPTKLNDLCFTNVYADSF
VIRGDEVRQIAPGQTGKIADYNYKLPDDFTGCVIAWNSNNLDSKVGGNYNYLYRLFRKSNLKPFERDISTEIYQAGNTPC
NGVEGENCYFPLQSYGFQPTNGVGYQPYRVVVLSFELLHAPATVCGPKKSTNLVKNKCVNFNFNGLTGTGVLTESNKKEL
PFQQFGRDIADTTDAVRDPQTLEILDITPCSFGGVSVITPGTNTSNQVAVLYQGVNCTEVPVAIHADQLTPTWRVYSTGS
NVFQTRAGCLIGAEHVNNSYECDIPIGAGICASYQTQTNSPGSASSVASQSIIAYTMSLGAENSVAYSNNSIAIPTNFTI
SVTTEILPVSMTKTSVDCTMYICGDSTECSNLLLQYGSFCTQLNRALTGIAVEQDKNTQEVFAQVKQIYKTPPIKDFGGF
NFSQILPDPSKPSKRSPIEDLLFNKVTLADAGFIKQYGDCLGDIAARDLICAQKFNGLTVLPPLLTDEMIAQYTSALLAG
TITSGWTFGAGPALQIPFPMQMAYRENGIGVTQNVLYENQKLIANQFNSAIGKIQDSLSSTPSALGKLQDVVNQNARALN
TLVKQLSSNFGAISSVLNDILSRLDPPEAEVQIDRLITGRLQSLQTYVTQQLIRAAEIRASANLAATKMSECVLGQSKRV
DFCGKGYHLMSFPQSAPHGVVFLHVTYVPAQEKNFTTAPAICHDGKAHFPREGVFVSNGTHWFVTQRNFYEPQIITTDNT
FVSGNCDVVIGIVNNTVYDPLQPELDSFKEELDKYFKNHTSPDVDLGDISGINASVVNIQKEIDRLNEVAKNLNESLIDL
QELGKYEQYIKWPWYIWLGFIAGLIAIVMVTIMLCCMTSCCSCLKGCCSCGSCCKFDEDDSEPVLKGVKLHYT
>P.3 (Based on GISAID ID: EPI_ISL_1073934),
SEQ ID NO: 37
MFVFLVLLPLVSSQCVNLTTRTQLPPAYTNSFTRGVYYPDKVFRSSVLHSTQDLFLPFFSNVTWFHAIHVSGTNGTKRED
NPVLPFNDGVYFASTEKSNIIRGWIFGTTLDSKTQSLLIVNNATNVVIKVCEFQFCNDPFYYHKNNKSWMESEFRVYSSA
NNCTFEYVSQPFLMDLEGKQGNFKNLREFVFKNIDGYFKIYSKHTPINLVRDLPQGFSALEPLVDLPIGINITRFQTLLH
RSYLTPGDSSSGWTAGAAACYVGYLQPRTFLLKYNENGTITDAVDCALDPLSETKCTLKSFTVEKGIYQTSNERVQPTES
IVRFPNITNLCPFGEVENATRFASVYAWNRKRISNCVADYSVLYNSASFSTFKCYGVSPTKLNDLCFTNVYADSFVIRGD
EVRQIAPGQTGKIADYNYKLPDDFTGCVIAWNSNNLDSKVGGNYNYLYRLFRKSNLKPFERDISTEIYQAGSTPCNGVKG
FNCYFPLQSYGFQPTYGVGYQPYRVVVLSFELLHAPATVCGPKKSTNLVKNKCVNFNFNGLTGTGVLTESNKKELPFQQF
GRDIADTTDAVRDPQTLEILDITPCSFGGVSVITPGTNTSNQVAVLYQGVNCTEVPVAIHADQLTPTWRVYSTGSNVFQT
RAGCLIGAEHVNNSYECDIPIGAGICASYQTQTNSHGSASSVASQSIIAYTMSLGAENSVAYSNNSIAIPTNFTISVTTE
ILPVSMTKTSVDCTMYICGDSTECSNLLLQYGSFCTQLNRALTGIAVEQDKNTQEVFAQVKQIYKTPPIKDFGGENFSQI
LPDPSKPSKRSPIEDLLFNKVTLADAGFIKQYGDCLGDIAARDLICAQKFNGLTVLPPLLTDEMIAQYTSALLAGTITSG
WTFGAGPALQIPFPMQMAYRENGIGVTQNVLYENQKLIANQFNSAIGKIQDSLSSTPSALGKLQDVVNQNAQALNTLVKQ
LSSNFGAISSVLNDILSRLDPPEAEVQIDRLITGRLQSLQTYVTQQLIRAAEIRASANLAATKMSECVLGQSKRVDFCGK
GYHLMSFPQSAPHGVVFLHVTYVPAQEKNFTTAPAICHDGKAHFPRKGVFVSNGTYWFVTQRNFYEPQIITTDNTFVSGN
CDVVIGIVNNTVYDPLQPELDSFKEELDKYFKNHTSPDVDLGDISGINASFVNIQKEIDRLNEVAKNLNESLIDLQELGK
YEQYIKWPWYIWLGFIAGLIAIVMVTIMLCCMTSCCSCLKGCCSCGSCCKFDEDDSEPVLKGVKLHYT
>A.27 (Based on GISAID ID: EPI_ISL_985238),
SEQ ID NO: 38
MFVFLVLLPLVSSQCVNFTTRTQLPPAYTNSFTRGVYYPDKVFRSSVLHSTQDLFLPFFSNVTWFHAIHVSGTNGTKRFD
NPVLPFNDGVYFASTEKSNIIRGWIFGTTLDSKTQSLLIVNNATNVVIKVCEFQFCNDPFLGVYYHKNNKSWMESEFRVY
SSANNCTFEYVSQPFLMDLEGKQGNFKNLREFVFKNIDGYFKIYSKHTPINLVRDLPQGFSALEPLVDLPIGINITRFQT
LLALHRSYLTPGDSSSGWTAGAAAYYVGYLQPRTFLLKYNENGTITDAVDCALDPLSETKCTLKSFTVEKGIYQTSNFRV
QPTESIVRFPNITNLCPFGEVENATRFASVYAWNRKRISNCVADYSVLYNSASFSTFKCYGVSPTKLNDLCFTNVYADSF
VIRGDEVRQIAPGQTGKIADYNYKLPDDFTGCVIAWNSNNLDSKVGGNYNYRYRLFRKSNLKPFERDISTEIYQAGSTPC
NGVEGENCYFPLQSYGFQPTYGVGYQPYRVVVLSFELLHAPATVCGPKKSTNLVKNKCVNFNFNGLTGTGVLTESNKKFL
PFQQFGRDIADTTDAVRDPQTLEILDITPCSFGGVSVITPGTNTSNQVAVLYQGVNCTEVPVAIHADQLTPTWRVYSTGS
NVFQTRAGCLIGVEYVNNSYECDIPIGAGICASYQTQTNSPGSASSVASQSIIAYTMSLGAENSVAYSNNSIAIPTNFTI
SVTTEILPVSMTKTSVDCTMYICGDSTECSNLLLQYGSFCTQLNRALTGIAVEQDKNTQEVFAQVKQIYKTPPIKYFGGF
NFSQILPDPSKPSKRSPIEDLLFNKVTLADAGFIKQYGDCLGDIAARDLICAQKFNGLTVLPPLLTDEMIAQYTSALLAG
TITSGWTFGAGPALQIPFPMQMAYRENGIGVTQNVLYENQKLIANQFNSAIGKIQDSLSSTPSALGKLQDVVNQNAQALN
TLVKQLSSNFGAISSVLNDILSRLDPPEAEVQIDRLITGRLQSLQTYVTQQLIRAAEIRASANLAATKMSECVLGQSKRV
DFCGKGYHLMSFPQSAPHGVVFLHVTYVPAQEKNFTTAPAICHDGKAHFPREGVFVSNGTHWFVTQRNFYEPQIITTDNT
FVSGNCDVVIGIVNNTVYDPLQPELDSFKEELDKYFKNHTSPDVDLGDISGINASVVNIQKEIDRLNEVAKNLNESLIDL
QELGKYEQYIKWPWYIWLVFIAGLIAIVMVTIMLCCMTSCCSCLKGCCSCGSCCKFDEDDSEPVLKGVKLHYT
>B.1.517,
SEQ ID NO: 39
MFVFLVLLPLVSSQCVNLTTRTQLPPAYTNSFTRGVYYPDKVFRSSVLHSTQDLFLPFFSNVTWFHAIHVSGTNGTKRED
NPVLPFNDGVYFASTEKSNIIRGWIFGTTLDSKTQSLLIVNNATNVVIKVCEFQFCNDPFLGVYYHKNNKSWMESEFRVY
SSANNCTFEYVSQPFLMDLEGKQGNFKNLREFVFKNIDGYFKIYSKHTPINLVRDLPQGFSALEPLVDLPIGINITRFQT
LLALHRSYLTPGDSSSGWTAGAAAYYVGYLQPRTFLLKYNENGTITDAVDCALDPLSETKCTLKSFTVEKGIYQTSNFRV
QPTESIVRFPNITNLCPFGEVFNATRFASVYAWNRKRISNCVADYSVLYNSASFSTFKCYGVSPTKLNDLCFTNVYADSF
VIRGDEVRQIAPGQTGKIADYNYKLPDDFTGCVIAWNSNNLDSKVGGNYNYLYRLFRKSNLKPFERDISTEIYQAGSTPC
NGVEGENCYFPLQSYGFQPTTGVGYQPYRVVVLSFELLHAPATVCGPKKSTNLVKNKCVNFNFNGLTGTGVLTESNKKEL
PFQQFGRDIADTTDAVRDPQTLEILDITPCSFGGVSVITPGTNTSNQVAVLYQDVNCTEVPVAIHADQLTPTWRVYSTGS
NVFQTRAGCLIGAEHVNNSYECDIPIGAGICASYQTQTNSPGSASSVASQSIIAYTMSLGAENSVAYSNNSIAIPTNFTI
SVTTEILPVSMTKTSVDCTMYICGDSTECSNLLLQYGSFCTQLNRALTGIAVEQDKNTQEVFAQVKQIYKTPPIKDFGGF
NFSQILPDPSKPSKRSPIEDLLFNKVTLADAGFIKQYGDCLGDIAARDLICAQKFNGLTVLPPLLTDEMIAQYTSALLAG
TITSGWTFGAGPALQIPFPMQMAYRFNGIGVTQNVLYENQKLIANQFNSAIGKIQDSLSSTPSALGKLQDVVNQNAQALN
TLVKQLSSNFGAISSVLNDILSRLDPPEAEVQIDRLITGRLQSLQTYVTQQLIRAAEIRASANLAATKMSECVLGQSKRV
DFCGKGYHLMSFPQSAPHGVVFLHVTYVPAQEKNFTTAPAICHDGKAHFPREGVFVSNGTHWFVTQRNFYEPQIITTDNT
FVSGNCDVVIGIVNNTVYDPLQPELDSFKEELDKYFKNHTSPDVDLGDISGINASVVNIQKEIDRLNEVAKNLNESLIDL
QELGKYEQYIKWPWYIWLGFIAGLIAIVMVTIMLCCMTSCCSCLKGCCSCGSCCKFDEDDSEPVLKGVKLHYT
>Original B.1.526,
SEQ ID NO: 40
MFVFFVLLPLVSSQCVNLTTRTQLPPAYTNSFTRGVYYPDKVFRSSVLHSTQDLFLPFFSNVTWFHAIHVSGTNGTKRFD
NPVLPFNDGVYFASIEKSNIIRGWIFGTTLDSKTQSLLIVNNATNVVIKVCEFQFCNDPFLGVYYHKNNKSWMESEFRVY
SSANNCTFEYVSQPFLMDLEGKQGNFKNLREFVFKNIDGYFKIYSKHTPINLVRDLPQGFSALEPLVDLPIGINITRFQT
LLALHRSYLTPGGSSSGWTAGAAAYYVGYLQPRTFLLKYNENGTITDAVDCALDPLSETKCTLKSFTVEKGIYQTSNFRV
QPTESIVRFPNITNLCPFGEVFNATRFASVYAWNRKRISNCVADYSVLYNSASFSTFKCYGVSPTKLNDLCFTNVYADSF
VIRGDEVRQIAPGQTGKIADYNYKLPDDFTGCVIAWNSNNLDSKVGGNYNYLYRLFRKSNLKPFERDISTEIYQAGSTPC
NGVEGENCYFPLQSYGFQPTNGVGYQPYRVVVLSFELLHAPATVCGPKKSTNLVKNKCVNFNFNGLTGTGVLTESNKKEL
PFQQFGRDIADTTDAVRDPQTLEILDITPCSFGGVSVITPGTNTSNQVAVLYQGVNCTEVPVAIHADQLTPTWRVYSTGS
NVFQTRAGCLIGAEHVNNSYECDIPIGAGICASYQTQTNSPGSASSVASQSIIAYTMSLGVENSVAYSNNSIAIPTNFTI
SVTTEILPVSMTKTSVDCTMYICGDSTECSNLLLQYGSFCTQLNRALTGIAVEQDKNTQEVFAQVKQIYKTPPIKDFGGF
NFSQILPDPSKPSKRSPIEDLLFNKVTLADAGFIKQYGDCLGDIAARDLICAQKFNGLTVLPPLLTDEMIAQYTSALLAG
TITSGWTFGAGPALQIPFPMQMAYRENGIGVTQNVLYENQKLIANQFNSAIGKIQDSLSSTPSALGKLQDVVNQNAQALN
TLVKQLSSNFGAISSVLNDILSRLDPPEAEVQIDRLITGRLQSLQTYVTQQLIRAAEIRASANLAATKMSECVLGQSKRV
DFCGKGYHLMSFPQSAPHGVVFLHVTYVPAQEKNFTTAPAICHDGKAHFPREGVFVSNGTHWFVTQRNFYEPQIITTDNT
FVSGNCDVVIGIVNNTVYDPLQPELDSFKEELDKYFKNHTSPDVDLGDISGINASVVNIQKEIDRLNEVAKNLNESLIDL
QELGKYEQYIKWPWYIWLGFIAGLIAIVMVTIMLCCMTSCCSCLKGCCSCGSCCKFDEDDSEPVLKGVKLHYT
>B.1.234,
SEQ ID NO: 41
MFVFLVLLPLVSSQCVNLTTRTQLPPAYTNSFTRGVYYPDKVFRSSVLHSTQDLFLPFFSNVTWFHAIHVSGTNGTKRED
NPVLPFNDGVYFASTEKSNIIRGWIFGTTLDSKTQSLLIVNNATNVVIKVCEFQFCNDPFLSVYYHKNNKSWMESEFRVY
SSANNCTFEYVSQPFLMDLVGKQGNFKNLREFVFKNIDGYFKIYSKHTPINLVRDLPQGFSALEPLVDLPIGINITRFQT
LLALHRSYLTPGDSSSGWTAGAAAYYVGYLQPRTFLLKYNENGTITDAVDCALDPLSETKCTLKSFTVEKGIYQTSNERV
QPTESIVRFPNITNLCPFGEVENATRFASVYAWNRKRISNCVADYSVLYNSASFSTFKCYGVSPTKLNDLCFTNVYADSF
VIRGDEVRQIAPGQTGKIADYNYKLPDDFTGCVIAWNSNNLDSKVGGNYNYLYRLFRKSNLKPFERDISTEIYQAGSTPC
NGVEGENCYFPLQSYGFQPTNGVGYQPYRVVVLSFELLHAPATVCGPKKSTNLVKNKCVNFNFNGLTGTGVLTESNKKEL
PFQQFGRDIADTTDAVRDPQTLEILDITPCSFGGVSVITPGTNTSNQVAVLYQGVNCTEVPVAIHADQLTPTWRVYSTGS
NVFQTRAGCLIGAEHVNNSYECDIPIGAGICASYQTHINSPGSASSVASQSIIAYTMSLGAENSVAYSNNSIAIPTNFTI
SVTTEILPVSMTKTSVDCTMYICGDSTECSNLLLQYGSFCTQLNRALTGIAVEQDKNTQEVFAQVKQIYKTPPIKDFGGF
NFSQILPDPSKPSKRSPIEDLLFNKVTLADAGFIKQYGDCLGDIAARDLICAQKFNGLTVLPPLLTDEMIAQYTSALLAG
TITSGWTFGAGPALQIPFPMQMAYRFNGIGVTQNVLYENQKLIANQFNSAIGKIQDSLSSTPSALGKLQDVVNQNAQALN
TLVKQLSSNFGAISSVLNDILSRLDPPEAEVQIDRLITGRLQSLQTYVTQQLIRAAEIRASANLAATKMSECVLGQSKRV
DFCGKGYHLMSFPQSAPHGVVFLHVTYVPAQEKNFTTAPAICHDGKAHFPREGVFVSNGTHWFVTQRNFYEPQIITTDNT
FVSGNCDVVIGIVNNTVYDPLQPELDSFKEELDKYFKNHTSPDVDLGDISGINASVVNIQKEIDRLNEVAKNLNESLIDL
QELGKYEQYIKWPWYIWLGFIAGLIAIVMVTIMLCCMTSCCSCLKGCCSCGSCCKFDEDDSEPVLKGVKLHYT
>B.1.1.318,
SEQ ID NO: 42
MFVFLVLLPLVSSQCVNLTTRTQLPPAYTNSFTRGVYYPDKVFRSSVLHSTQDLFLPFFSNVTWFHAIHVSGTNGTKRFD
NPVLPFNDGVYFASTEKSNIIRGWIFGTTLDSKTQSLLIVNNATNVVIKVCEFQFCNDPFLGVYYHKNNKSWMESEFRVY
SSANNCTFEYVSQPFLMDLEGKQGNFKNLREFVFKNIDGYFKIYSKHTPINLVRDLPQGFSALEPLVDLPIGINITRFQT
LLALHRSYLTPGDSSSGWTAGAAAYYVGYLQPRTFLLKYNENGTITDAVDCALDPLSETKCTLKSFTVEKGIYQTSNERV
QPTESIVRFPNITNLCPFGEVENATRFASVYAWNRKRISNCVADYSVLYNSASFSTFKCYGVSPTKLNDLCFTNVYADSF
VIRGDEVRQIAPGQTGKIADYNYKLPDDFTGCVIAWNSNNLDSKVGGNYNYLYRLFRKSNLKPFERDISTEIYQAGSTPC
NGVKGFNCYFPLQPYGFQPTYGVGYQPYRVVVLSFELLHAPATVCGPKKSTNLVKNKCVNFNFNGLTGTGVLTESNKKEL
PFQQFGRDIADTTDAVRDPQTLEILDITPCSFGGVSVITPGTNTSNQVAVLYQGVNCTEVPVAIHADQLTPTWRVYSTGS
NVFQTRAGCLIGAEHVNNSYECDIPIGAGICASYQTQTNSHGSASSVASQSIIAYTMSLGAENSVAYSNNSIAIPTNFTI
SVTTEILPVSMTKTSVDCTMYICGDSTECSNLLLQYGSFCTQLNRALTGIAVEQDKNTQEVFAQVKQTYKTPPIKDFGGF
NFSQILPDPSKPSKRSPIEDLLFNKVTLADAGFIKQYGDCLGDIAARDLICAQKFNGLTVLPPLLTDEMIAQYTSALLAG
TITSGWTFGAGPALQIPFPMQMAYRENGIGVTQNVLYENQKLIANQFNSAIGKIQDSLSSTPSALGKLQDVVNQNAQALN
TLVKQLSSNFGAISSVLNDILSRLDPPEAEVQIDRLITGRLQSLQTYVTQQLIRAAEIRASANLAATKMSECVLGQSKRV
DFCGKGYHLMSFPQSAPHGVVFLHVTYVPAQEKNFTTAPAICHDGKAHFPREGVFVSNGTHWFVTQRNFYKPQIITTDNT
FVSGNCDVVIGIVNNTVYDPLQPELDSFKEELDKYFKNHTSPDVDLGDISGINASVVNIQKEIDRLNEVAKNLNESLIDL
QELGKYEQYIKWPWYIWLGFIAGLIAIVMVTIMLCCMTSCCSCLKGCCSCGSCCKFDEDDSEPVLKGVKLHYT
>B.1.616,
SEQ ID NO: 43
MFVFLVLLPLVSSQCVNLTTRTQLPPAYTNSFTRGVYYPDKVFRSSVLHSTQDLFLPFFSNVTWFDAIHVSGTNGTKRED
NPVLPFNDGVYFASTEKSNIIRGWIFGTTLDSKTQSLLIVNNATNVVIKVCEFQFCNDPFLVVYHKNNKSWMESEFRVYS
SANNCTFEYVSQPFLMDLEGKQGNFKNLREFVFKNIDGYFKIYSKHTPINLVRGLPQGFSALEPLVDLPIGINITRFQTL
LALHRSYLTPGDSSSGWTAGAAAYYVGYLQPRTFLLKYNENGTITDAVDCALDPLSETKCTLKSFTVEKGIYQTSNERVQ
PTESIVRFPNITNLCPFGEVENATRFASVYAWNRKRISNCVADYSVLYNSASFSTFKCYGVSPTKLNDLCFTNVYADSFV
IRGDEVRQIAPGQTGKIADYNYKLPDDFTGCVIAWNSNNLDSKVGGNYNYLYRLFRKSNLKPFERDISTEIYQAGSTPCN
GAEGFNCYFPLQSYGFQPTNGVGYQPYRVVVLSFELLHAPATVCGPKKSTNLVKNKCVNFNFNGLTGTGVLTESNKKFLP
FQQFGRDIADTTDAVRDPQTLEILDITPCSFGGVSVITPGTNTSNQVAVLYQDVNCTEVPVAIHADQLTPTWRVYSTGSN
VFQTRAGCLIGAEYVNNSYECDIPIGASICASYQTQTNSPGSASSVASQSIIAYTMSLGAENSVAYSNNSIAIPTNFTIS
VTTEILPVSMTKTSVDCTMYICGDSTECSNLLLQYGSFCTQLNRALTGIAVEQDKNTQEVFAQVKQIYKTPPIKDFGGEN
FSQILPDPSKPSKRSPIEDLLFNKVTLADAGFIKQYGDCLGDIAARDLICAQKENGLTVLPPLLTDEMIAQYTSALLAGT
ITSGWTFGAGPALQIPFPMQMAYRENGIGVTQNVLYENQKLIANQFNSAIGKIQDSLSSTPSALGKLRDVVNQNAQALNT
LVKQLSSNFGAISSVLNDILSRLDPPEAEVQIDRLITGRLQSLQTYVTQQLIRAAEIRASANLAATKMSECVLGQSKRVD
FCGKGYHLMSFPQSAPHGVVFLHVTYVPAQEKNFTTAPAICHDGKDHFPREGVFVSNGTHWFVTQRNFYEPQIITTDNTF
VSGNCDVVIGIVNNTVYDPLQPELDSFKEELDKYFKNHTSPDVDLGDISGINASVVNIQKEIDRLNEVAKNLNESLIDLQ
ELGKYEQYIKWPWYIWLGFIAGLIAIVMVTIMLCCMTSCCSCLKGCCSCGSCCKFDEDDSEPVLKGVKLHYT
>B.1.575,
SEQ ID NO: 44
MFVFLVLLPLVSSQCVNLTTRTQLPPAYTNSFTRGVYYPDKVFRSSVLHSTQDLFLPFFSNVTWFHAIHVSGTNGTKRED
NPVLPFNDGVYFASTEKSNIIRGWIFGTTLDSKTQSLLIVNNATNVVIKVCEFQFCNDPFLGVYYHKNNKSWMESEFRVY
SSANNCTFEYVSQPFLMDLEGKQGNFKNLREFVFKNIDGYFKIYSKHTPINLVRDLPQGFSALEPLVDLPIGINITRFQT
LLALHRSYLTPGDSSSGWTAGAAAYYVGYLQPRTELLKYNENGTITDAVDCALDPLSETKCTLKSFTVEKGIYQTSNERV
QPTESIVRFPNITNLCPFGEVENATRFASVYAWNRKRISNCVADYSVLYNSASFSTFKCYGVSPTKLNDLCFTNVYADSF
VIRGDEVRQIAPGQTGKIADYNYKLPDDFTGCVIAWNSNNLDSKVGGNYNYLYRLFRKSNLKPFERDISTEIYQAGSTPC
NGVEGENCYFPLQPYGFQPTNGVGYQPYRVVVLSFELLHAPATVCGPKKSTNLVKNKCVNFNFNGLTGTGVLTESNKKFL
PFQQFGRDIADTTDAVRDPQTLEILDITPCSFGGVSVITPGTNTSNQVAVLYQGVNCTEVPVAIHADQLTPTWRVYSTGS
NVFQTRAGCLIGAEHVNNSYECDIPIGAGICASYQTQTNSHGSASSVASQSIIAYTMSLGAENSVAYSNNSIAIPINFTI
SVTTEILPVSMTKTSVDCTMYICGDSTECSNLLLQYGSFCTQLNRALTGIAVEQDKNTQEVFAQVKQIYKTPPIKDFGGF
NFSQILPDPSKPSKRSPIEDLLFNKVTLADAGFIKQYGDCLGDIAARDLICAQKFNGLTVLPPLLTDEMIAQYTSALLAG
TITSGWTFGAGPALQIPFPMQMAYRENGIGVTQNVLYENQKLIANQFNSAIGKIQDSLSSTPSALGKLQDVVNQNAQALN
TLVKQLSSNFGAISSVLNDILSRLDPPEAEVQIDRLITGRLQSLQTYVTQQLIRAAEIRASANLAATKMSECVLGQSKRV
DFCGKGYHLMSFPQSAPHGVVFLHVTYVPAQEKNFTTAPAICHDGKAHFPREGVFVSNGTHWFVTQRNFYEPQIITTDNT
FVSGNCDVVIGIVNNTVYDPLQPELDSFKEELDKYFKNHTSPDVDLGDISGINASVVNIQKEIDRLNEVAKNLNESLIDL
QELGKYEQYIKWPWYIWLGFIAGLIAIVMVTIMLCCMTSCCSCLKGCCSCGSCCKFDEDDSEPVLKGVKLHYT
>B.1.621,
SEQ ID NO: 16
MFVFLVLLPLVSSQCVNLTTRTQLPPAYTNSFTRGVYYPDKVFRSSVLHSTQDLFLPFFSNVTWFHAIHVSGTNGTKRED
NPVLPFNDGVYFASIEKSNIIRGWIFGTTLDSKTQSLLIVNNATNVVIKVCEFQFCNDPFLGTSNHKNNKSWMESEFRVY
SSANNCTFEYVSQPFLMDLEGKQGNFKNLREFVFKNIDGYFKIYSKHTPINLVRDLPQGFSALEPLVDLPIGINITRFQT
LLALHRSYLTPGDSSSGWTAGAAAYYVGYLQPRTFLLKYNENGTITDAVDCALDPLSETKCTLKSFTVEKGIYQTSNERV
QPTESIVRFPNITNLCPFGEVENATKFASVYAWNRKRISNCVADYSVLYNSASFSTFKCYGVSPTKLNDLCFTNVYADSF
VIRGDEVRQIAPGQTGKIADYNYKLPDDFTGCVIAWNSNNLDSKVGGNYNYLYRLFRKSNLKPFERDISTEIYQAGSTPC
NGVKGFNCYFPLQSYGFQPTYGVGYQPYRVVVLSFELLHAPATVCGPKKSTNLVKNKCVNFNFNGLTGTGVLTESNKKEL
PFQQFGRDIADTTDAVRDPQTLEILDITPCSFGGVSVITPGTNTSNQVAVLYQGVNCTEVPVAIHADQLTPTWRVYSTGS
NVFQTRAGCLIGAEHVNNSYECDIPIGAGICASYQTQTNSHGSASSVASQSIIAYTMSLGAENSVAYSNNSIAIPTNFTI
SVTTEILPVSMTKTSVDCTMYICGDSTECSNLLLQYGSFCTQLNRALTGIAVEQDKNTQEVFAQVKQIYKTPPIKDEGGF
NFSQILPDPSKPSKRSPIEDLLFNKVTLADAGFIKQYGDCLGDIAARDLICAQKENGLTVLPPLLTDEMIAQYTSALLAG
TITSGWTFGAGPALQIPFPMQMAYRENGIGVTQNVLYENQKLIANQFNSAIGKIQDSLSSTPSALGKLQNVVNQNAQALN
TLVKQLSSNFGAISSVLNDILSRLDPPEAEVQIDRLITGRLQSLQTYVTQQLIRAAEIRASANLAATKMSECVLGQSKRV
DFCGKGYHLMSFPQSAPHGVVFLHVTYVPAQEKNFTTAPAICHDGKAHFPREGVFVSNGTHWFVTQRNFYEPQIITTDNT
FVSGNCDVVIGIVNNTVYDPLQPELDSFKEELDKYFKNHTSPDVDLGDISGINASVVNIQKEIDRLNEVAKNLNESLIDL
QELGKYEQYIKWPWYIWLGFIAGLIAIVMVTIMLCCMTSCCSCLKGCCSCGSCCKFDEDDSEPVLKGVKLHYT

[0097] In some aspects, the recombinant SARS-CoV-2 S ectodomain included in the fusion protein comprises F817P, A892P, A899P, A942P, K986P, and V987P substitutions (numbering with reference to SEQ ID NO: 1) and an amino acid sequence at least 90% (such as at least 95%, at least 96%, at least 97%, at least 98%, or at least 99%) identical to any one of residues 14-1206 of SEQ ID NOs: 19 and 20; residues 14-1205 of SEQ ID NOs: 21-23, and 30; residues 14-1208 of SEQ ID NOs: 16, 24-25, 28-29, 31-32, 34-36, 38-42, and 44; residues 14-1201 of SEQ ID NO: 26; residues 14-1200 of SEQ ID NO: 27; residues 14-1203 of SEQ ID NO: 37; or residues 14-1207 of SEQ ID NOs: 33 and 43.

[0098] In some aspects, the recombinant SARS-CoV-2 S ectodomain included in the fusion protein comprises F817P, A892P, A899P, A942P, K986P, V987P, and a RRAR (682-685)-to-GSAS substitution (numbering with reference to SEQ ID NO: 1) and an amino acid sequence at least 90% (such as at least 95%, at least 96%, at least 97%, at least 98%, or at least 99%) identical to any one of residues 14-1206 of SEQ ID NOs: 19 and 20, residues 14-1205 of SEQ ID NOs: 21-23 and 30, residues 14-1208 of SEQ ID NOs: 16, 24-25, 28-29, 31-32, 34-36, 38-42, and 44, residues 14-1201 of SEQ ID NO: 26, residues 14-1200 of SEQ ID NO: 27, residues 14-1203 of SEQ ID NO: 37, or residues 14-1207 of SEQ ID NOs: 33 and 43.

[0099] In some aspects, the recombinant SARS-CoV-2 S ectodomain included in the fusion protein comprises or consists of any one of residues 14-1206 of SEQ ID NOs: 19 and 20, residues 14-1205 of SEQ ID NOs: 21-23 and 30, residues 14-1208 of SEQ ID NOs: 16, 24-25, 28-29, 31-32, 34-36, 38-42, and 44, residues 14-1201 of SEQ ID NO: 26, residues 14-1200 of SEQ ID NO: 27, residues 14-1203 of SEQ ID NO: 37, or residues 14-1207 of SEQ ID NOs: 33 and 43.

[0100] The recombinant SARS-CoV-2 S ectodomain included in the fusion protein is fused to HBsAg via a peptide linker. Any suitable peptide linker may be used that allows for folding and trimerization of the SARS-CoV-2 S ectodomain on the surface of the HBsAg nanoparticle. In some aspects, the peptide linker (such as a glycine-serine linker) is from 12-39 amino acids in length, such as 12-32, 16-32, 28-36, 28-32, 12-36, or 20-29, amino acids in length. In some aspects, the peptide linker (such as a glycine-serine linker) is any one of 12, 13, 14, 15, 16, 17, 18, 19, 20, 21, 22, 23, 24, 25, 26, 27, 28, 29, 30, 31, 32, 33, 34, 35, 36, 37, 38, or 39 amino acids in length. In some aspects, the peptide linker (such as a glycine-serine linker) is 12 amino acids in length. In some aspects, the peptide linker (such as a glycine-serine linker) is 16 amino acids in length. In some aspects, the peptide linker (such as a glycine-serine linker) is 24 amino acids in length. In some aspects, the peptide linker (such as a glycine-serine linker) is 32 amino acids in length. In some aspects, the peptide linker is composed of a repeat of GS di-peptides. In some aspects, the peptide linker has a sequence set forth as one of the 6-GS, 8-GS, 10-GS, 12-GS, 16-GS linkers:

(6-GS):
(SEQ ID NO: 4)
GSGSGSGSGSGS
(8-GS):
(SEQ ID NO: 5)
GSGSGSGSGSGSGSGS
(12-GS):
(SEQ ID NO: 6)
GSGSGSGSGSGSGSGSGSGSGSGS
(16-GS):
(SEQ ID NO: 7)
GSGSGSGSGSGSGSGSGSGSGSGSGSGSGSGS

[0101] The recombinant SARS-CoV-2 S ectodomain included in the fusion protein is fused to the HBsAg protein via the peptide linker. In several aspects, the HBsAg protein comprises or consists of a HBsAg S protein, a HBsAg M protein, or a HBsAg L protein. Exemplary HBsAg protein sequences are provided below:

>SEQ ID NO: 9:
MENTTSGFLGPLLVLQAGFFLLTRILTIPQSLDSWWTSLNFLGGAPTCPGQNSRSPISNHSPTSCPPICPGY
RWMCLRRFIIFLFILLLCLIFLLVLLDYQGMLPVCPLLPGTSTTSTGPCKTCTNPANGTSMFPSCCCTKPSD
GNCTCIPIPSSWAFARFLWEWASVRESWLSELVPFVQWFVGLSPTVWLSVMWMMWYWGPSLYNILSPFLPLL
PIFFCLWVYI
>adw (accession AY066028.1), SEQ ID NO: 45
MENTTSGFLGPLLVLQAGFFLLTRILTIPQSLDSWWTSLNFLGGAPTCPGQNSQSPISNHSPTSCPPICPGY
RWMCLRRFIIFLFILLLCLIFLLVLLDYQGMLPVCPLLPGTSTTSTGPCKTCTIPAQGTSMFPSCCCTKPSD
GNCTCIPIPSSWAFAKFLWEWASVRESWLSLLVPFVQWFVGLSPTVWLSVIWMMWYWGPRLYNILSPFLPLL
PIFFCLWVYI
>ayw (accession YP_009173871), SEQ ID NO: 46
MENITSGFLGPLLVLQAGFFLLTRILTIPQSLDSWWTSLNFLGGTTVCLGQNSQSPTSNHSPTSCPPTCPGY
RWMCLRRFIIFLFILLLCLIFLLVLLDYQGMLPVCPLIPGSSTTSTGPCRTCMTTAQGTSMYPSCCCTKPSD
GNCTCIPIPSSWAFGKELWEWASARESWLSLLVPFVQWFVGLSPTVWLSVIWMMWYWGPSLYSILSPFLPLL
PIFFCLWVYI
>ayr (accession AY738845.1), SEQ ID NO: 47
MESTTSGFLGPLLVLQAGFFLLTRILTIPQSLDSWWTSLNFLGGAPTCPGQNSQSPISNHSPTSCPPICPGY
RWMCLRRFIIFLFILLLCLIFLLVLLDYQGMLAVCPLLPGTSTTSTGPCRTCTIPAQGTSMFPSCCCTKPSD
GNCTCIPIPSSWAFARFLWEWASVRESWLSSLVPFVQWFAGLSPTVWLSVIWMMWYWGPSLYNILSPFLPLL
PIFFCLWVYI
>adr M (accession ABS18962.1), SEQ ID NO: 48
MQWNSSTFHQALLDPRVRGLYFPAGGSSSGTVNPVPTTASPISSIFSRTGDPAPNMESTTSGFLGPLLALQA
GFFLLTRILTIPQSLDSWWTSLNFLGGAPTCPGQNLQSPTSNHSPTSCPPICPGYRWMCLRRFIIFLFILLL
CLIFLLVLLDYQGMLPVCPLLPGTSTTSTGPCKTCTIPAQGTSMFPSCCCTKPSDGNCTCIPIPSSWAFARE
LWEWASVRFSWLSLLVPFVQWFVGLSPTVWLSVIWMMWYWGPSLYNILNPFLPLLPIFFCLWVYI
>adw M (accession ALG05526.1), SEQ ID NO: 49
MQWNSTTFHQTLQDPRVRALYFPAGGSSSGTLSPAQNTVSTISSILSKTGDPVPNMENIASGLLGPLLVLQA
GFFLLTKILTIPQSLDSWWTSLNFLGGTPVCLGQNSQSQISSHSPTCCPPICPGYRWMCLRRFIIFLCILLL
CLIFLLVLLDYQGMLPVCPLIPGSSTTSTGPCKTCTTPAQGTSMFPSCCCTKPTDGNCTCIPIPSSWAFAKY
LWEWASVRFSWLSLLVPFVQWFVGLSPTVWLSVIWMMWYWGPSLYNILSPFMPLLPIFFCLWVYI
>adw M (accession ADG03429.1), SEQ ID NO: 50
MQWNSTQFHQALLDPRVRGLYFPAGGSSSETQNPAPTIASLTSSIFSKTGDPAMNMENITSGLLGPLLVLQA
VCFLLTKILTIPQSLDSWWTSLNFLGVPPGCPGQNSQSPISNHLPTSCPPTCPGYRWMCLRRFIIFLFILLL
CLIFLLVLLDYQGMLPVCPLLPGSTTTSTGPCKTCTTLAQGTSMFPSCCCIKPSDGNCTCIPIPSSWAFGKY
LWEWASARFSWLSLLVQFVQWCVGLSPTVWLLVIWMIWYWGPNLCSILSPFIPLLPIFCYLWASI
>ayw M (accession AGL51218.1), SEQ ID NO: 51
MQWNSTTFHQTLQDPRVRALYFPAGGSSSGTVSPAQNTVSAISSILSKTGDPVPNMENIASGLLGPLLVLQA
GFFLLTKILTIPQSLDSWWTSLNFLGGTPVCLGQNSQSQTSSHSPTCCPPICPGYRWMCLRRFIIFLCILLL
CLIFLLVLLDYQGMLPVCPLIPGSSTTSTGPCRTCTTPAQGTSMFPSCCCTKPTDGNCTCIPIPSSWAFAKY
LWEWASVRFSWLSLLVPFVQWFVGLSPTVWLSVIWMMWEWGPSLYNILSPFMPLLPIFFCLWVYI
>ayr M (accession ADC29599.1), SEQ ID NO: 52
MQWNSTTFHQALLDPRVRGLYFPAGGSSSGTVNPVPTTASPISSILSKTGDPAPNMENITSGLLGPLLVLQA
GFFLLTKILTMPQSLDSWWISHNFLGGTPVCLGQNSQSQISSHSPTCCPPICPGYRWMCLRRFIIFLFILLL
CLIFLLVLLDYQGMLPVCPLLPGTSTTSTGTCRTCTIPAQGTSMFPSCCCTKPSAGNCTCIPIPSSWAFARE
LWEWASVRFSWLSLLVPFVQWFVGLSPTVWLSVIWMMWYWGPSLYNILSPFLPLLPIFFCLWVYI
>adr L (accession P03140), SEQ ID NO: 53
MGGWSSKPRQGMGTNLSVPNPLGFFPDHQLDPAFGANSNNPDWDENPNKDQWPEANQVGAGAFGPGFTPPHG
GLLGWSPQAQGILTTVPAAPPPASTNRQSGRQPTPISPPLRDSHPQAMQWNSTTFHQALLDPRVRGLYFPAG
GSSSGTVNPVPTTASPISSIFSRTGDPAPNMENTTSGFLGPLLVLQAGFFLLTRILTIPQSLDSWWTSLNFL
GGAPTCPGQNSQSPTSNHSPTSCPPICPGYRWMCLRRFIIFLFILLLCLIFLLVLLDYQGMLPVCPLLPGTS
TTSTGPCKTCTIPAQGTSMFPSCCCTKPSDGNCTCIPIPSSWAFARFLWEWASVRESWLSLLVPFVQWEVGL
SPTVWLSVIWMMWYWGPSLYNILSPFLPLLPIFFCLWVYI
>adw L (accession Q02317), SEQ ID NO: 54
MGGWSSKPRKGMGTNLSVPNPLGFFPDHQLDPAFGANSNNPDWDENPIKDHWPQANQVGVGAFGPGFTPPHG
GVLGWSPQAQGILATVPAMPPPASTNRQSGRQPTPISPPLRDSHPQAMQWNSTAFHQALQDPRVRGLYFPAG
GSSSGTLNPVPTIASHISSISSRIGDPAPNMENITSGELGPLLVLQAGFFLLTRILTIPQSLDSWWTSLNEL
GGAPVCLGQNSQSPTSNHSPTSCPPICPGYRWMCLRRFIIFLFILLLCLIFLLVLLDYQGMLPVCPLIPGST
TTSTGPCKTCTTPAQGNSMFPSCCCTKPTDGNCTCIPIPSSWAFAKYLWEWASVRESWLSLLVPFVQWEVGL
SPTVWLSAIWMMWYWGPSLYNILSPFIPLLPIFFCLWVYI
>ayw L (accession Q998L9), SEQ ID NO: 55
MGGWSSKHRKGMGTNLSVPNPLGFFPDHQLDPAFGANSNNPDWDENPNKDHWPEANQVGAGAFGPGFTPPHG
GFLGWSPQAQGILITVPAAPPPASTNRQSGRQPTPISPPLRDTHPQAMQWNSTAFHQALQDPRVRGLYFPAG
GSSSGTVNPVPNTVSHISSIFTKTGDPASNMESTTSGFLGPLLVLQAGFFLLTRILTIPQSLDSWWTSLNEL
GGAPGCIGQNSQSQTSNHSPTSCPPTCPGYRWMCLRRFIIFLFILLLCLIFLLVLLDYQGMLPVCPLLPGST
TTSTGPCRICTITAQGISMFPSCCCTKPSDGNCTCIPIPSSWGFAKFLWEWASVRESWLSLLVPFVQWFAGL
SPTVWLSVIWMIWYWGPSLYNILSPELPLLPIFLCLWVYI
>ayr L (accession Q76R62), SEQ ID NO: 56
MGGWSSKPRQGMGINLSVPNPLGFFPDHQLDPAFGANSNNPDWDENPNKDHWPEANQVGAGAFGPGFTPPHG
GLLGWSPQAQGILITLPAAPPPASTNRQSGRQPTPISPPLRDSHPQAMQWNSTTFHQALLDPRVRGLYFPAG
GSSSGTVNPVPTTASPISSIFSRTGDPAPNMESTTSGFLGPLLVLQAGFFLLTRILTIPQSLDSWWTSLNFL
GGAPTCPGQNSQSPTSNHSPTSCPPTCPGYRWMCLRRFIIFLFILLLCLIFLLVLLDYQGMLPVCPLLPGTS
TTSTGPCRTCTIPAQGTSMFPSCCCTKPSDGNCTCIPIPSSWAFARFLWEWASVRFSWLSLLVPFVQWEVGL
SPTVWLSAIWMMWYWGPSLYNILSPFLPLLPIFFCLWVYI

[0102] In some aspects, the HBsAg in the fusion protein comprises an amino acid sequence at least 90% (such as at least 95%, at least 96%, at least 97%, at least 98%, or at least 99%) identical to any one of SEQ ID NOs: 9 or 45-56. In some aspects, the HBsAg in the fusion protein comprises or consists of the amino acid sequence set forth as any one of SEQ ID NOs: 9 or 45-56.

[0103] Exemplary SARS-CoV-2/HBsAg fusion protein sequences encoded by the nucleic acid molecules are provided herein, including those listed in Table 1:

TABLE 1
Exemplary SARS-CoV-2 S ectodomain - HBsAg fusion proteins

| SEQ ID | |
|---|---|
| NO | Sequence description |
| | S6P-8-HBsAg S sequences, with SARS-CoV-2 sequence |
| | based on: |
| 10 | S6P(1-1206)-8-HBsAgS(1-226) |
| 57 | B.1.617.2 (Based on GISAID ID: EPI_ISL_2020950) |
| 58 | B.1.617.2 (Based on CDC website on Aug. 31, 2021) |
| 59 | B.1.1.7 (Based on GISAID ID: EPI_ISL_629440) |
| 60 | B.1.1.7 (Based on CDC website on Aug. 31, 2021) |
| 61 | B.1.351 (Based on GISAID ID: EPI_ISL_1120737) |
| 62 | P.1 (Based on GISAID ID: EPI_ISL_833171) |
| 63 | B.1.617.1 (Based on GISAID ID: EPI_ISL_1384866) |
| 64 | C.37-1 (Based on GISAID ID: EPI_ISL_1138413) |
| 65 | C.37-2 (Based on GISAID ID: EPI_ISL_1138413) |
| 66 | R.1 (Based on GISAID ID: EPI_ISL_1123466) |
| 67 | B.1.1.519 (Based on GISAID ID: EPI_ISL_876555) |
| 68 | B.1.525 (Based on GISAID ID: EPI_ISL_760883) |
| 69 | B.1.526 (Based on GISAID ID: EPI_ISL_1080798) |
| 70 | B.1.427/429 (Based on GISAID ID: EPI_ISL_984563 |
| | (B.1.427), EPI_ISL_672374 (B.1.429)) |
| 71 | B.1.526.1 (Based on GISAID ID: EPI_ISL_896306) |
| 72 | P.2 (Based on GISAID ID: EPI_ISL_717936) |
| 73 | A.23.1 (Based on GISAID ID: EPI_ISL_1469353) |
| 74 | B.1.526.2 (Based on GISAID ID: EPI_ISL_823886) |
| 75 | P.3 (Based on GISAID ID: EPI_ISL_1073934) |
| 76 | A.27 (Based on GISAID ID: EPI_ISL_985238) |
| 77 | B.1.517 |
| 78 | Original B.1.526 |
| 79 | B.1.234 |
| 80 | B.1.1.318 |
| 81 | B.1.616 |
| 82 | B.1.575 |
| 17 | B.1.621 |
| | S6P-12-HBsAg S sequences, with SARS-CoV-2 sequence |
| | based on: |
| 11 | S6P(1-1206)-12-HBsAgS(1-226) |
| 83 | B.1.617.2 (Based on GISAID ID: EPI_ISL_2020950) |
| 84 | B.1.617.2 (Based on CDC website on Aug. 31, 2021) |
| 85 | B.1.1.7 (Based on GISAID ID: EPI_ISL_629440) |
| 86 | B.1.1.7 (Based on CDC website on Aug. 31, 2021) |
| 87 | B.1.351-1 (Based on GISAID ID: EPI_ISL_1120737) |
| 88 | P.1 (Based on GISAID ID: EPI_ISL_833171) |
| 89 | B.1.617.1 (Based on GISAID ID: EPI_ISL_1384866) |
| 90 | C.37-1 (Based on GISAID ID: EPI_ISL_1138413) |
| 91 | C.37-2 (Based on GISAID ID: EPI_ISL_1138413) |
| 92 | R.1 (Based on GISAID ID: EPI_ISL_1123466) |
| 93 | B.1.1.519 (Based on GISAID ID: EPI_ISL_876555) |
| 94 | B.1.525 (Based on GISAID ID: EPI_ISL_760883) |
| 95 | B.1.526 (Based on GISAID ID: EPI_ISL_1080798) |
| 96 | B.1.427/429 (Based on GISAID ID: EPI_ISL_984563 |
| | (B.1.427), EPI_ISL_672374 (B.1.429)) |
| 97 | B.1.526.1 (Based on GISAID ID: EPI_ISL_896306) |
| 98 | P.2 (Based on GISAID ID: EPI_ISL_717936) |
| 99 | A.23.1 (Based on GISAID ID: EPI_ISL_1469353) |
| 100 | B.1.526.2 (Based on GISAID ID: EPI_ISL_823886) |
| 101 | P.3 (Based on GISAID ID: EPI_ISL_1073934) |
| 102 | A.27 (Based on GISAID ID: EPI_ISL_985238) |
| 103 | B.1.517 |
| 104 | Original B.1.526 |
| 105 | B.1.234 |
| 106 | B.1.1.318 |
| 107 | B.1.616 |
| 108 | B.1.575 |
| 18 | B.1.621 |
| | S6P-16-HBsAg S sequences, with SARS-CoV-2 sequence |
| | based on: |
| 12 | S6P(1-1206)-16-HBsAgS(1-226) |
| 109 | B.1.617.2 (Based on GISAID ID: EPI_ISL_2020950) |
| 110 | B.1.617.2 (Based on CDC website on Aug. 31, 2021) |
| 111 | B.1.1.7 (Based on GISAID ID: EPI_ISL_629440) |
| 112 | B.1.1.7 (Based on CDC website on Aug. 31, 2021) |
| 113 | B.1.351-1 (Based on GISAID ID: EPI_ISL_1120737) |
| 114 | P.1 (Based on GISAID ID: EPI_ISL_833171) |
| 115 | B.1.617.1 (Based on GISAID ID: EPI_ISL_1384866) |
| 116 | C.37-1 (Based on GISAID ID: EPI_ISL_1138413) |
| 117 | C.37-2 (Based on GISAID ID: EPI_ISL_1138413) |
| 118 | R.1 (Based on GISAID ID: EPI_ISL_1123466) |
| 119 | B.1.1.519 (Based on GISAID ID: EPI_ISL_876555) |
| 120 | B.1.525 (Based on GISAID ID: EPI_ISL_760883) |
| 121 | B.1.526 (Based on GISAID ID: EPI_ISL_1080798) |
| 122 | B.1.427/429 (Based on GISAID ID: EPI_ISL_984563 |
| | (B.1.427), EPI_ISL_672374 (B.1.429)) |
| 123 | B.1.526.1 (Based on GISAID ID: EPI_ISL_896306) |
| 124 | P.2 (Based on GISAID ID: EPI_ISL_717936) |
| 125 | A.23.1 (Based on GISAID ID: EPI_ISL_1469353) |
| 126 | B.1.526.2 (Based on GISAID ID: EPI_ISL_823886) |
| 127 | P.3 (Based on GISAID ID: EPI_ISL_1073934) |
| 128 | A.27 (Based on GISAID ID: EPI_ISL_985238) |
| 129 | B.1.517 |
| 130 | Original B.1.526 |
| 131 | B.1.234 |
| 132 | B.1.1.318 |
| 133 | B.1.616 |
| 134 | B.1.575 |
| 315 | B.1.621 |
| | S6P-8-HBsAg M sequences, with SARS-CoV-2 sequence |
| | based on: |
| 135 | S6P |
| 136 | B.1.617.2 (Based on GISAID ID: EPI_ISL_2020950) |
| 137 | B.1.617.2 (Based on CDC website on Aug. 31, 2021) |
| 138 | B.1.1.7 (Based on GISAID ID: EPI_ISL_629440) |
| 139 | B.1.1.7 (Based on CDC website on Aug. 31, 2021) |
| 140 | B.1.351-1 (Based on GISAID ID: EPI_ISL_1120737) |
| 141 | P.1 (Based on GISAID ID: EPI_ISL_833171) |
| 142 | B.1.617.1 (Based on GISAID ID: EPI_ISL_1384866) |
| 143 | C.37-1 (Based on GISAID ID: EPI_ISL_1138413) |
| 144 | C.37-2 (Based on GISAID ID: EPI_ISL_1138413) |
| 145 | R.1 (Based on GISAID ID: EPI_ISL_1123466) |
| 146 | B.1.1.519 (Based on GISAID ID: EPI_ISL_876555) |
| 147 | B.1.525 (Based on GISAID ID: EPI_ISL_760883) |
| 148 | B.1.526 (Based on GISAID ID: EPI_ISL_1080798) |
| 149 | B.1.427/429 (Based on GISAID ID: EPI_ISL_984563 |
| | (B.1.427), EPI_ISL_672374 (B.1.429)) |
| 150 | B.1.526.1 (Based on GISAID ID: EPI_ISL_896306) |
| 151 | P.2 (Based on GISAID ID: EPI_ISL_717936) |
| 152 | A.23.1 (Based on GISAID ID: EPI_ISL_1469353) |
| 153 | B.1.526.2 (Based on GISAID ID: EPI_ISL_823886) |
| 154 | P.3 (Based on GISAID ID: EPI_ISL_1073934) |
| 155 | A.27 (Based on GISAID ID: EPI_ISL_985238) |
| 156 | B.1.517 |
| 157 | Original B.1.526 |
| 158 | B.1.234 |
| 159 | B.1.1.318 |
| 160 | B.1.616 |
| 161 | B.1.575 |
| 316 | B.1.621 |
| | S6P-12-HBsAg M sequences, with SARS-CoV-2 sequence |
| | based on: |
| 162 | S6P |
| 163 | B.1.617.2 (Based on GISAID ID: EPI_ISL_2020950) |
| 164 | B.1.617.2 (Based on CDC website on Aug. 31, 2021) |
| 165 | B.1.1.7 (Based on GISAID ID: EPI_ISL_629440) |
| 166 | B.1.1.7 (Based on CDC website on Aug. 31, 2021) |
| 167 | B.1.351-1 (Based on GISAID ID: EPI_ISL_1120737) |
| 168 | P.1 (Based on GISAID ID: EPI_ISL_833171) |
| 169 | B.1.617.1 (Based on GISAID ID: EPI_ISL_1384866) |
| 170 | C.37-1 (Based on GISAID ID: EPI_ISL_1138413) |
| 171 | C.37-2 (Based on GISAID ID: EPI_ISL_1138413) |
| 172 | R.1 (Based on GISAID ID: EPI_ISL_1123466) |
| 173 | B.1.1.519 (Based on GISAID ID: EPI_ISL_876555) |
| 174 | B.1.525 (Based on GISAID ID: EPI_ISL_760883) |
| 175 | B.1.526 (Based on GISAID ID: EPI_ISL_1080798) |
| 176 | B.1.427/429 (Based on GISAID ID: EPI_ISL_984563 |
| | (B.1.427), EPI_ISL_672374 (B.1.429)) |
| 177 | B.1.526.1 (Based on GISAID ID: EPI_ISL_896306) |
| 178 | P.2 (Based on GISAID ID: EPI_ISL_717936) |
| 179 | A.23.1 (Based on GISAID ID: EPI_ISL_1469353) |
| 180 | B.1.526.2 (Based on GISAID ID: EPI_ISL_823886) |
| 181 | P.3 (Based on GISAID ID: EPI_ISL_1073934) |
| 182 | A.27 (Based on GISAID ID: EPI_ISL_985238) |
| 183 | B.1.517 |
| 184 | Original B.1.526 |
| 185 | B.1.234 |
| 186 | B.1.1.318 |
| 187 | B.1.616 |
| 188 | B.1.575 |
| 317 | B.1.621 |
| | S6P-16-HBsAg M sequences, with SARS-CoV-2 sequence |
| | based on: |
| 189 | S6P |
| 190 | B.1.617.2 (Based on GISAID ID: EPI_ISL_2020950) |
| 191 | B.1.617.2 (Based on CDC website on Aug. 31, 2021) |
| 192 | B.1.1.7 (Based on GISAID ID: EPI_ISL_629440) |
| 193 | B.1.1.7 (Based on CDC website on Aug. 31, 2021) |
| 194 | B.1.351-1 (Based on GISAID ID: EPI_ISL_1120737) |
| 195 | P.1 (Based on GISAID ID: EPI_ISL_833171) |
| 196 | B.1.617.1 (Based on GISAID ID: EPI_ISL_1384866) |
| 197 | C.37-1 (Based on GISAID ID: EPI_ISL_1138413) |
| 198 | C.37-2 (Based on GISAID ID: EPI_ISL_1138413) |
| 199 | R.1 (Based on GISAID ID: EPI_ISL_1123466) |
| 200 | B.1.1.519 (Based on GISAID ID: EPI_ISL_876555) |
| 201 | B.1.525 (Based on GISAID ID: EPI_ISL_760883) |
| 202 | B.1.526 (Based on GISAID ID: EPI_ISL_1080798) |
| 203 | B.1.427/429 (Based on GISAID ID: EPI_ISL_984563 |
| | (B.1.427), EPI_ISL_672374 (B.1.429)) |
| 204 | B.1.526.1 (Based on GISAID ID: EPI_ISL_896306) |
| 205 | P.2 (Based on GISAID ID: EPI_ISL_717936) |
| 206 | A.23.1 (Based on GISAID ID: EPI_ISL_1469353) |
| 207 | B.1.526.2 (Based on GISAID ID: EPI_ISL_823886) |
| 208 | P.3 (Based on GISAID ID: EPI_ISL_1073934) |
| 209 | A.27 (Based on GISAID ID: EPI_ISL_985238) |
| 210 | B.1.517 |
| 211 | Original B.1.526 |
| 212 | B.1.234 |
| 213 | B.1.1.318 |
| 214 | B.1.616 |
| 215 | B.1.575 |
| 318 | B.1.621 |
| | S6P-8-HBsAg L sequences, with SARS-CoV-2 sequence |
| | based on: |
| 216 | S6P |
| 217 | B.1.617.2 (Based on GISAID ID: EPI_ISL_2020950) |
| 218 | B.1.617.2 (Based on CDC website on Aug. 31, 2021) |
| 219 | B.1.1.7 (Based on GISAID ID: EPI_ISL_629440) |
| 220 | B.1.1.7 (Based on CDC website on Aug. 31, 2021) |
| 221 | B.1.351-1 (Based on GISAID ID: EPI_ISL_1120737) |
| 222 | P.1 (Based on GISAID ID: EPI_ISL_833171) |
| 223 | B.1.617.1 (Based on GISAID ID: EPI_ISL_1384866) |
| 224 | C.37-1 (Based on GISAID ID: EPI_ISL_1138413) |
| 225 | C.37-2 (Based on GISAID ID: EPI_ISL_1138413) |
| 226 | R.1 (Based on GISAID ID: EPI_ISL_1123466) |
| 227 | B.1.1.519 (Based on GISAID ID: EPI_ISL_876555) |
| 228 | B.1.525 (Based on GISAID ID: EPI_ISL_760883) |
| 229 | B.1.526 (Based on GISAID ID: EPI_ISL_1080798) |
| 230 | B.1.427/429 (Based on GISAID ID: EPI_ISL_984563 |
| | (B.1.427), EPI_ISL_672374 (B.1.429)) |
| 231 | B.1.526.1 (Based on GISAID ID: EPI_ISL_896306) |
| 232 | P.2 (Based on GISAID ID: EPI_ISL_717936) |
| 233 | A.23.1 (Based on GISAID ID: EPI_ISL_1469353) |
| 234 | B.1.526.2 (Based on GISAID ID: EPI_ISL_823886) |
| 235 | P.3 (Based on GISAID ID: EPI_ISL_1073934) |
| 236 | A.27 (Based on GISAID ID: EPI_ISL_985238) |
| 237 | B.1.517 |
| 238 | Original B.1.526 |
| 239 | B.1.234 |
| 240 | B.1.1.318 |
| 241 | B.1.616 |
| 242 | B.1.575 |
| 319 | B.1.621 |
| | S6P-12-HBsAg L sequences, with SARS-CoV-2 sequence |
| | based on: |
| 243 | S6P |
| 244 | B.1.617.2 (Based on GISAID ID: EPI_ISL_2020950) |
| 245 | B.1.617.2 (Based on CDC website on Aug. 31, 2021) |
| 246 | B.1.1.7 (Based on GISAID ID: EPI_ISL_629440) |
| 247 | B.1.1.7 (Based on CDC website on Aug. 31, 2021) |
| 248 | B.1.351-1 (Based on GISAID ID: EPI_ISL_1120737) |
| 249 | P.1 (Based on GISAID ID: EPI_ISL_833171) |
| 250 | B.1.617.1 (Based on GISAID ID: EPI_ISL_1384866) |
| 251 | C.37-1 (Based on GISAID ID: EPI_ISL_1138413) |
| 252 | C.37-2 (Based on GISAID ID: EPI_ISL_1138413) |
| 253 | R.1 (Based on GISAID ID: EPI_ISL_1123466) |
| 254 | B.1.1.519 (Based on GISAID ID: EPI_ISL_876555) |
| 255 | B.1.525 (Based on GISAID ID: EPI_ISL_760883) |
| 256 | B.1.526 (Based on GISAID ID: EPI_ISL_1080798) |
| 257 | B.1.427/429 (Based on GISAID ID: EPI_ISL_984563 |
| | (B.1.427), EPI_ISL_672374 (B.1.429)) |
| 258 | B.1.526.1 (Based on GISAID ID: EPI_ISL_896306) |
| 259 | P.2 (Based on GISAID ID: EPI_ISL_717936) |
| 260 | A.23.1 (Based on GISAID ID: EPI_ISL_1469353) |
| 261 | B.1.526.2 (Based on GISAID ID: EPI_ISL_823886) |
| 262 | P.3 (Based on GISAID ID: EPI_ISL_1073934) |
| 263 | A.27 (Based on GISAID ID: EPI_ISL_985238) |
| 264 | B.1.517 |
| 265 | Original B.1.526 |
| 266 | B.1.234 |
| 267 | B.1.1.318 |
| 268 | B.1.616 |
| 269 | B.1.575 |
| 320 | B.1.621 |
| | S6P-16-HBsAg L sequences, with SARS-CoV-2 sequence |
| | based on: |
| 270 | S6P |
| 271 | B.1.617.2 (Based on GISAID ID: EPI_ISL_2020950) |
| 272 | B.1.617.2 (Based on CDC website on Aug. 31, 2021) |
| 273 | B.1.1.7 (Based on GISAID ID: EPI_ISL_629440) |
| 274 | B.1.1.7 (Based on CDC website on Aug. 31, 2021) |
| 275 | B.1.351-1 (Based on GISAID ID: EPI_ISL_1120737) |
| 276 | P.1 (Based on GISAID ID: EPI_ISL_833171) |
| 277 | B.1. 617.1 (Based on GISAID ID: EPI_ISL_1384866) |
| 278 | C.37-1 (Based on GISAID ID: EPI_ISL_1138413) |
| 279 | C.37-2 (Based on GISAID ID: EPI_ISL_1138413) |
| 280 | R.1 (Based on GISAID ID: EPI_ISL_1123466) |
| 281 | B.1.1.519 (Based on GISAID ID: EPI_ISL_876555) |
| 282 | B.1.525 (Based on GISAID ID: EPI_ISL_760883) |
| 283 | B.1.526 (Based on GISAID ID: EPI_ISL_1080798) |
| 284 | B.1.427/429 (Based on GISAID ID: EPI_ISL_984563 |
| | (B.1.427), EPI_ISL_672374 (B.1.429)) |
| 285 | B.1.526.1 (Based on GISAID ID: EPI_ISL_896306) |
| 286 | P.2 (Based on GISAID ID: EPI_ISL_717936) |
| 287 | A.23.1 (Based on GISAID ID: EPI_ISL_1469353) |
| 288 | B.1.526.2 (Based on GISAID ID: EPI_ISL_823886) |
| 289 | P.3 (Based on GISAID ID: EPI_ISL_1073934) |
| 290 | A.27 (Based on GISAID ID: EPI_ISL_985238) |
| 291 | B.1.517 |
| 292 | Original B.1.526 |
| 293 | B.1.234 |
| 294 | B.1.1.318 |
| 295 | B.1.616 |
| 296 | B.1.575 |
| 321 | B.1.621 |

[0104] The fusion protein sequences provided in Table 1 include a signal peptide (residues 1-13) that is removed from the protein as expressed in mammalian cells. In some aspects, the fusion protein encoded by the nucleic acid molecule comprises or consists of an amino acid sequence at least 90% (such as at least 95%, at least 96%, at least 97%, at least 98%, at least 99%) identical to residues 14 to the C-terminus of any one of the SARS-CoV-2-HBsAg fusion proteins provided in Table 1. For example, the fusion protein comprises or consists of an amino acid sequence at least 90% (such as at least 95%, at least 96%, at least 97%, at least 98%, at least 99%) identical to residues 14 to the C-terminus of any one of SEQ ID NOs: 10-12, 17-18, or 57-321, wherein the SARS-CoV-2 S ectodomain in the fusion protein includes F817P, A892P, A899P, A942P, K986P, V987P, and RRAR (682-685)-to-GSAS substitutions according to the reference SARS-CoV-2 S set forth as SEQ ID NO: 1.

[0105] In some aspects, the fusion protein encoded by the nucleic acid molecule comprises or consists of the amino acid sequence set forth as residues 14 to the C-terminus of any one of the SARS-CoV-1 HBsAg fusion proteins provided in Table 1, such as any one of SEQ ID NOs: 10-12, 17-18, or 57-503. When a nucleic acid molecule encoding the fusion protein is expressed in mammalian cells, the fusion protein self-assembles to form a HBsAg nanoparticle with SARS-CoV-2 S ectodomain trimers extending radially outward from an outer surface of the HBsAg nanoparticle.

[0106] Exemplary DNA sequences encoding fusion protein sequences as disclosed herein are provided as the following:

S6P-8-HBsAg
(SEQ ID NO: 13)
ATGTTCGTGTTTCTGGTGCTGCTGCCCCTGGTGAGCTCCCAGTGCGTGAACCTGACCACAAGGACCCAGCTG
CCCCCTGCCTATACCAATTCCTTTACAAGGGGCGTGTACTATCCAGACAAGGTGTTCCGCTCTAGCGTGCTG
CACTCTACACAGGATCTGTTCCTGCCCTTCTTTAGCAACGIGACCTGGTTTCACGCCATCCACGTGAGCGGC
ACCAATGGCACAAAGCGGTTTGACAATCCTGTGCTGCCATTCAACGATGGCGTGTACTTTGCCTCCACCGAG
AAGTCTAACATCATCAGAGGCTGGATCTTCGGCACCACACTGGACAGCAAGACACAGTCCCTGCTGATCGTG
AACAATGCCACCAACGTGGTCATCAAGGTGTGCGAGTTCCAGTTTTGCAATGATCCCTTTCTGGGCGTGTAC
TATCACAAGAACAATAAGICTTGGATGGAGAGCGAGTTCCGCGTGTATTCCICTGCCAACAATTGCACATTC
GAGTACGTGAGCCAGCCTTTTCTGATGGACCTGGAGGGCAAGCAGGGCAACTTCAAGAACCTGAGGGAGTTC
GTGTTTAAGAATATCGATGGCTATTICAAGATCTACTCTAAGCACACCCCAATCAACCTGGTGCGCGACCTG
CCACAGGGCTTTAGCGCCCTGGAGCCCCTGGTGGATCTGCCTATCGGCATCAACATCACCCGGTTCCAGACA
CTGCTGGCCCTGCACAGAAGCTACCTGACACCCGGCGACAGCTCCTCTGGATGGACCGCAGGAGCAGCAGCC
TACTATGTGGGCTATCTGCAGCCTCGGACCTTTCTGCTGAAGTACAACGAGAATGGCACCATCACAGACGCC
GIGGATTGTGCCCTGGACCCCCTGAGCGAGACCAAGTGCACACTGAAGTCCTTCACCGTGGAGAAGGGCATC
TATCAGACATCCAACTTCCGGGTGCAGCCAACCGAGTCTATCGTGCGCTTCCCAAATATCACAAACCTGTGC
CCCTTTGGCGAGGIGTTCAACGCCACCAGATTCGCCAGCGTGTACGCCTGGAATAGGAAGCGCATCTCTAAC
TGCGTGGCCGACTATAGCGTGCTGTACAACTCCGCCTCTTTCAGCACCTTTAAGTGTTATGGCGTGTCCCCC
ACAAAGCTGAATGATCTGTGCTTCACCAACGTGTACGCCGATTCTTTTGTGATCAGGGGCGACGAGGIGCGC
CAGATCGCACCAGGACAGACAGGCAAGATCGCCGACTACAATTATAAGCTGCCCGACGATTTCACCGGCTGC
GTGATCGCCTGGAACTCCAACAATCIGGATTCTAAAGTGGGCGGCAACTACAATTATCTGTACCGGCTGTTC
AGAAAGTCCAATCTGAAGCCTTTTGAGAGGGACATCTCTACAGAGATCTACCAGGCCGGCAGCACCCCATGT
AATGGCGTGGAGGGCTTTAACTGCTATTTCCCTCTGCAGAGCTACGGCTTTCAGCCAACCAACGGCGTGGGC
TATCAGCCCTACCGCGTGGIGGTGCTGAGCTTCGAGCTGCTGCACGCACCTGCAACCGTGTGCGGACCAAAG
AAGTCCACCAATCTGGTGAAGAACAAGTGCGTGAACTTCAACTTCAACGGACTGACCGGAACAGGCGIGCTG
ACCGAGTCCAACAAGAAGTTCCTGCCATTTCAGCAGTTCGGCCGGGACATCGCCGATACCACAGACGCCGTG
AGAGACCCTCAGACCCTGGAGATCCTGGATATCACACCATGTAGCTTCGGCGGCGTGTCCGTGATCACACCA
GGAACCAATACAAGCAACCAGGTGGCCGTGCTGTATCAGGACGTGAATTGCACCGAGGTGCCAGTGGCAATC
CACGCAGATCAGCTGACCCCTACATGGAGGGTGTACTCCACCGGCTCTAACGTGTTCCAGACAAGGGCAGGA
TGCCTGATCGGAGCAGAGCACGTGAACAATTCCTATGAGTGTGACATCCCAATCGGAGCAGGAATCTGCGCA
TCTTACCAGACCCAGACAAACAGCCCTGGCTCCGCCAGCTCCGTGGCATCCCAGTCTATCATCGCCTATACC
ATGAGCCTGGGCGCCGAGAATTCCGTGGCCTACTCTAACAATAGCATCGCCATCCCCACCAACTTTACAATC
TCCGTGACCACAGAGATCCTGCCCGTGAGCATGACCAAGACAAGCGTGGACTGTACAATGTATATCTGCGGC
GATTCCACCGAGTGTTCTAACCTGCTGCTGCAGTACGGCAGCTTCTGCACCCAGCTGAATAGGGCCCTGACA
GGAATCGCAGTGGAGCAGGACAAGAACACACAGGAGGTGTTTGCCCAGGTGAAGCAGATCTACAAGACCCCA
CCCATCAAGGACTTCGGCGGCTTCAACTTCAGCCAGATCCTGCCTGATCCATCCAAGCCATCTAAGCGGAGC
CCCATCGAGGACCTGCTGTTCAACAAGGTGACCCTGGCCGATGCCGGCTTTATCAAGCAGTATGGCGAITGT
CTGGGCGACATCGCCGCCAGAGACCTGATCTGCGCCCAGAAGTTTAATGGCCTGACCGTGCTGCCTCCACTG
CTGACAGATGAGAIGATCGCACAGTACACAAGCGCCCTGCTGGCAGGAACCATCACATCCGGATGGACCTTC
GGCGCAGGACCTGCCCTGCAGATCCCCTTCCCTATGCAGATGGCCTATCGGITCAACGGCATCGGCGTGACC
CAGAATGTGCTGTACGAGAACCAGAAGCTGATCGCCAATCAGITTAACTCCGCCATCGGCAAGATCCAGGAC
TCTCTGTCTAGCACACCAAGCGCCCTGGGCAAGCTGCAGGATGTGGTGAATCAGAACGCCCAGGCCCTGAAT
ACCCTGGTGAAGCAGCTGTCCTCTAACTTCGGCGCCATCAGCTCCGTGCTGAATGATATCCTGAGCCGGCTG
GACCCCCCTGAGGCAGAGGTGCAGATCGACCGGCTGATCACAGGCAGACTGCAGTCTCTGCAGACCTACGTG
ACACAGCAGCTGATCAGGGCAGCAGAGATCAGGGCAAGCGCCAATCTGGCAGCAACCAAGATGTCCGAGTGC
GTGCTGGGCCAGTCTAAGAGAGTGGACTTCTGCGGCAAGGGCTAICACCTGATGAGCTTTCCTCAGTCCGCC
CCACACGGAGTGGTGTTCCTGCACGTGACCTACGTGCCAGCCCAGGAGAAGAACTTCACCACAGCCCCCGCC
ATCTGTCACGATGGCAAGGCACACTTCCCAAGGGAGGGCGTGTTTGTGAGCAACGGCACCCACTGGTTCGTG
ACACAGAGAAACTTCTACGAGCCCCAGATCATCACCACAGACAATACATTCGTGTCCGGCAACTGCGACGTG
GICATCGGCATCGTGAACAATACCGTGTATGATCCCCTGCAGCCTGAGCTGGACAGCTICAAGGAGGAGCTG
GATAAGTACTTTAAGAATCACACCTCCCCTGACGTGGATCTGGGCGACATCTCCGGCATCAATGCCTCTGTG
GTGAACATCCAGAAGGAGATCGACAGGCTGAACGAGGTGGCCAAGAATCTGAACGAGTCTCTGATCGATCTG
CAGGAGCTGGGCAAGTACGGCAGCGGCTCCGGCTCTGGCAGCGGCTCCGGCTCTGGCAGCGGCTCCATGGAG
AATACCACATCCGGCTTTCTGGGACCTCTGCTGGTGCTGCAGGCAGGCTTCITTCTGCTGACCCGCATCCTG
ACAATCCCACAGTCCCTGGATTCTTGGTGGACAAGCCTGAACTTCCTGGGAGGAGCACCAACCTGTCCAGGA
CAGAATTCTAGGAGCCCCACCAGCAACCACTCCCCTACATCTTGTCCACCCATCTGCCCAGGATATAGGIGG
ATGTGCCTGCGGCGGTTCATCATCTTCCTGITTATCCTGCTGCTGTGCCTGATCTTCCTGCTGGTGCTGCTG
GACTACCAGGGCATGCTGCCCGTGTGCCCACTGCTGCCAGGCACCAGCACCACATCCACAGGACCTTGTAAG
ACCTGCACAAATCCAGCCAACGGCACCTCTATGTTTCCCAGCTGCTGTTGCACAAAGCCTTCCGATGGCAAT
TGTACCTGCATCCCAATCCCCTCTAGCTGGGCCTTTGCCCGGTTCCTGTGGGAGTGGGCCTCTGTGAGATTC
TCTTGGCTGAGCTTTCTGGTGCCTTTCGTGCAGTGGTTTGTGGGCCTGTCCCCAACCGTGTGGCTGTCTGTG
ATGTGGATGATGTGGTATTGGGGCCCCAGCCTGTACAACATCCTGTCCCCTTTCCTGCCACTGCTGCCCATC
TTCTTTTGCCTGTGGGTGTACATCTGA
S6P-12-HBsAg
(SEQ ID NO: 14)
ATGTTCGTGTTTCTGGTGCTGCTGCCCCTGGTGAGCTCCCAGTGCGTGAACCTGACCACAAGGACCCAGCTG
CCCCCTGCCTATACCAATAGCTTTACAAGGGGCGTGTACTATCCAGACAAGGTGTTCCGCTCTAGCGTGCTG
CACAGCACACAGGATCTGTTCCTGCCCTTCTTTTCCAACGTGACCTGGTTTCACGCCATCCACGTGTCCGGC
ACCAATGGCACAAAGCGGTTTGACAATCCTGTGCTGCCATTCAACGATGGCGTGTACTTTGCCTCTACCGAG
AAGAGCAACATCATCAGAGGCTGGATCTTCGGCACCACACTGGACTCCAAGACACAGTCTCTGCTGATCGTG
AACAATGCCACCAACGTGGTCATCAAGGTGTGCGAGTTCCAGTTTTGCAATGATCCCTTTCTGGGCGTGTAC
TATCACAAGAACAATAAGAGCTGGATGGAGTCCGAGTTCCGCGTGTATTCCTCTGCCAACAATTGCACATTC
GAGTACGTGAGCCAGCCTTTTCTGATGGACCTGGAGGGCAAGCAGGGCAACTTCAAGAACCTGAGGGAGTTC
GTGTTTAAGAATATCGATGGCTATTTCAAGATCTACAGCAAGCACACCCCAATCAACCTGGTGCGCGACCTG
CCACAGGGCTTTTCCGCCCTGGAGCCCCTGGTGGATCTGCCTATCGGCATCAACATCACCCGGTTCCAGACA
CTGCTGGCCCTGCACAGATCCTACCTGACACCCGGCGACAGCTCCTCTGGATGGACCGCAGGAGCAGCAGCC
TACTATGTGGGCTATCTGCAGCCTCGGACCTTTCTGCTGAAGTACAACGAGAATGGCACCATCACAGACGCC
GTGGATTGTGCCCTGGACCCCCTGTCCGAGACCAAGTGCACACTGAAGTCTTTCACCGTGGAGAAGGGCATC
TATCAGACATCTAACTTCCGGGTGCAGCCAACCGAGAGCATCGTGCGCTTCCCAAATATCACAAACCTGTGC
CCCTTTGGCGAGGIGTTCAACGCCACCAGATTCGCCAGCGTGTACGCCTGGAATAGGAAGCGCATCAGCAAC
TGCGTGGCCGACTATTCCGTGCTGTACAACTCCGCCTCTTTCAGCACCTTTAAGTGTTATGGCGTGTCTCCC
ACAAAGCTGAATGATCTGTGCTTCACCAACGTGTACGCCGATAGCTTTGTGATCAGGGGCGACGAGGTGCGC
CAGATCGCACCAGGACAGACAGGCAAGATCGCCGACTACAATTATAAGCTGCCCGACGATTTCACCGGCTGC
GTGATCGCCTGGAACTCTAACAATCTGGATAGCAAAGTGGGCGGCAACTACAATTATCTGTACCGGCTGTTC
AGAAAGAGCAATCTGAAGCCTTTTGAGAGGGACATCAGCACAGAGATCTACCAGGCCGGCTCCACCCCATGT
AATGGCGTGGAGGGCTTTAACTGCTATTTCCCTCTGCAGTCCTACGGCITTCAGCCAACCAACGGCGTGGGC
TATCAGCCCTACCGCGTGGTGGTGCTGTCCTTCGAGCTGCTGCACGCACCTGCAACCGTGTGCGGACCAAAG
AAGTCTACCAATCTGGTGAAGAACAAGTGCGTGAACTTCAACTTCAACGGACTGACCGGAACAGGCGTGCTG
ACCGAGAGCAACAAGAAGTTCCTGCCATTTCAGCAGTTCGGCCGGGACATCGCCGATACCACAGACGCCGTG
AGAGACCCTCAGACCCTGGAGATCCTGGATATCACACCATGTTCCTTCGGCGGCGTGTCTGTGATCACACCC
GGCACCAATACATCCAACCAGGTGGCCGTGCTGTATCAGGACGTGAATTGCACCGAGGTGCCAGTGGCAATC
CACGCAGATCAGCIGACCCCTACATGGAGGGTGTACTCTACCGGCAGCAACGTGTTCCAGACAAGGGCAGGA
TGCCTGATCGGAGCAGAGCACGTGAACAATTCTTATGAGTGTGACATCCCAATCGGAGCAGGAATCTGCGCA
AGCTACCAGACCCAGACAAACTCCCCTGGCTCTGCCAGCTCCGTGGCATCCCAGTCTATCATCGCCTATACC
ATGTCCCTGGGCGCCGAGAATTCTGTGGCCTACAGCAACAATTCCATCGCCATCCCCACCAACTTTACAATC
AGCGTGACCACAGAGATCCTGCCTGTGAGCATGACCAAGACATCCGTGGACTGTACAATGTATATCTGCGGC
GATTCTACCGAGTGTAGCAACCTGCTGCTGCAGTACGGCTCCTTCTGCACCCAGCTGAATAGGGCCCTGACA
GGAATCGCAGTGGAGCAGGACAAGAACACACAGGAGGTGTTTGCCCAGGTGAAGCAGATCTACAAGACCCCA
CCCATCAAGGACTICGGCGGCTTCAACTTCAGCCAGATCCTGCCTGATCCATCTAAGCCAAGCAAGCGGTCC
CCCATCGAGGACCTGCTGTTCAACAAGGTGACCCTGGCCGATGCCGGCTTTATCAAGCAGTATGGCGATTGT
CTGGGCGACATCGCCGCCAGAGACCTGATCTGCGCCCAGAAGTTTAATGGCCTGACCGTGCTGCCTCCACTG
CTGACAGATGAGAIGATCGCACAGTACACATCCGCCCTGCTGGCAGGCACCATCACATCTGGATGGACCTTC
GGCGCAGGACCTGCCCTGCAGATCCCCTTCCCTATGCAGATGGCCTATCGGTTCAACGGCATCGGCGTGACC
CAGAATGTGCTGTACGAGAACCAGAAGCTGATCGCCAATCAGTTTAACAGCGCCATCGGCAAGATCCAGGAC
AGCCTGTCTAGCACACCATCCGCCCTGGGCAAGCTGCAGGATGTGGTGAATCAGAACGCCCAGGCCCTGAAT
ACCCTGGTGAAGCAGCTGTCCTCTAACTTCGGCGCCATCAGCTCCGTGCTGAATGATATCCTGTCCCGGCTG
GACCCCCCTGAGGCAGAGGTGCAGATCGACCGGCTGATCACAGGCAGACTGCAGAGCCTGCAGACCTACGTG
ACACAGCAGCTGATCAGGGCAGCAGAGATCAGGGCATCCGCCAATCTGGCAGCAACCAAGATGTCTGAGTGC
GTGCTGGGCCAGAGCAAGAGAGTGGACTTCTGCGGCAAGGGCTATCACCTGATGTCCTTTCCTCAGTCTGCC
CCACACGGCGTGGTGTTCCTGCACGIGACCTACGTGCCAGCCCAGGAGAAGAACTTCACCACAGCCCCCGCC
ATCTGTCACGATGGCAAGGCACACTTCCCAAGGGAGGGCGTGTTCGTGAGCAACGGCACCCACTGGTTCGTG
ACACAGAGAAACTICTACGAGCCCCAGATCATCACCACAGACAATACATTCGTGTCTGGCAACTGCGACGTG
GTCATCGGCATCGTGAACAATACCGTGTATGATCCCCTGCAGCCTGAGCTGGACTCCTTCAAGGAGGAGCTG
GATAAGTACTTTAAGAATCACACCTCTCCCGACGTGGATCTGGGCGACATCTCTGGCATCAATGCCAGCGTG
GTGAACATCCAGAAGGAGATCGACAGGCTGAACGAGGIGGCCAAGAATCTGAACGAGAGCCTGATCGATCTG
CAGGAGCTGGGCAAGTACGGCAGCGGCTCCGGCTCTGGCAGCGGCTCCGGCTCTGGCAGCGGCTCCGGCTCT
GGCAGCGGCTCCGGCTCTATGGAGAATACCACAAGCGGCTTTCTGGGACCTCTGCTGGTGCTGCAGGCAGGC
TTCTTTCTGCTGACCCGCATCCTGACAATCCCACAGTCTCTGGATAGCTGGIGGACATCCCTGAACTTCCTG
GGAGGAGCACCAACCTGTCCAGGACAGAATAGCAGGTCCCCCACCTCCAACCACTCTCCTACAAGCTGTCCA
CCCATCTGCCCTGGCTATCGCTGGATGTGCCTGCGGCGGTTCATCATCTTCCTGTTTATCCTGCTGCTGTGC
CTGATCTTCCTGCTGGTGCTGCTGGACTACCAGGGCATGCTGCCCGTGTGCCCACTGCTGCCAGGCACCTCC
ACCACATCTACAGGCCCTTGTAAGACCTGCACAAATCCAGCCAACGGCACCAGCATGTTTCCCTCCTGCTGT
TGCACAAAGCCTTCTGATGGCAATTGTACCTGCATCCCAATCCCCTCTAGCTGGGCCTTTGCCCGGTTCCTG
TGGGAGIGGGCAAGCGTGAGATTCAGCTGGCTGTCCTITCTGGTGCCTTTCGTGCAGTGGTTTGTGGGCCTG
TCTCCAACCGTGTGGCTGAGCGTGATGTGGATGATGTGGTATTGGGGCCCCTCCCTGTACAACATCCTGTCT
CCTTTCCTGCCACTGCTGCCCATCTTCTTTTGCCTGTGGGTGTACATCTGA
S6P-16-HBsAg
(SEQ ID NO: 15)
ATGTTCGTGTTTCTGGTGCTGCTGCCCCTTGTGAGCTCCCAGTGTGTGAACCTGACCACAAGGACCCAGCTG
CCCCCTGCCTATACCAATAGCTTTACAAGGGGCGTGTACTATCCAGACAAGGTGTTCCGCTCTAGCGTGCTG
CACTCCACACAGGATCTGTTCCTGCCCTTCTTTTCTAACGTGACCTGGTTTCACGCCATCCACGTGTCCGGC
ACCAATGGCACAAAGCGGTTTGACAATCCTGTGCTGCCATTCAACGATGGCGTGTACTTTGCCAGCACCGAG
AAGTCCAACATCATCAGAGGCTGGATCTTCGGCACCACACTGGACTCTAAGACACAGAGCCTGCTGATCGTG
AACAATGCCACCAACGTGGTGATCAAAGTGTGTGAGTTCCAGTTTTGCAATGATCCCTTTCTGGGCGTGTAC
TATCACAAGAACAATAAGTCCTGGATGGAGTCTGAGTTCCGCGTGTATTCCTCTGCCAACAATTGCACATTC
GAGTACGTGAGCCAGCCTTTTCTGATGGACCTGGAGGGCAAGCAGGGCAATTTTAAGAACCTGAGGGAGTTC
GTGTTTAAGAATATCGATGGCTATTICAAGATCTACTCCAAGCACACCCCAATCAACCTGGTGCGCGACCTG
CCCCAGGGCTTTTCTGCCCTGGAGCCCCTGGTGGATCTGCCTATCGGCATCAACATCACCCGGTTCCAGACA
CTGCTGGCCCTGCACAGAAGCTACCTGACACCCGGCGACAGCTCCTCTGGATGGACCGCAGGAGCAGCAGCC
TACTATGTGGGCTATCTGCAGCCTAGGACCTTTCTGCTGAAGTACAACGAGAATGGCACCATCACAGACGCC
GTGGATTGTGCCCTGGACCCCCTGTCTGAGACCAAGTGCACACTGAAGAGCTTCACCGTGGAGAAGGGCATC
TATCAGACAAGCAATTTTAGGGTGCAGCCAACCGAGTCCATCGTGCGCTTCCCAAATATCACAAACCTGTGT
CCCTTTGGCGAGGIGTTCAACGCAACCAGGTTCGCAAGCGTGTACGCATGGAATAGGAAGCGCATCTCCAAC
TGCGTGGCCGACTATTCTGTGCTGTACAACTCCGCCTCTTTCAGCACCTTTAAGTGTTATGGCGTGAGCCCC
ACAAAGCTGAATGATCTGTGCTTCACCAACGTGTACGCCGATTCCTTTGTGATCAGGGGAGACGAAGTGAGG
CAGATCGCACCAGGACAGACAGGCAAGATCGCCGACTACAATTATAAGCTGCCCGACGATTTCACCGGCTGC
GTGATCGCCTGGAACAGCAACAATCIGGATTCCAAAGTGGGCGGCAACTACAATTATCTGTACCGGCTGTTC
AGAAAGAGCAATCTGAAGCCTTTTGAGAGGGACATCTCCACAGAGATCTACCAGGCCGGCTCTACCCCATGT
AATGGCGTGGAGGGCTTTAACTGCTATTTCCCTCTGCAGICCTACGGCTTTCAGCCAACCAACGGCGTGGGC
TATCAGCCCTACCGCGTGGTGGTGCTGTCTTTCGAGCTGCTGCACGCACCTGCAACAGTGTGTGGACCAAAG
AAGAGCACCAATCTGGTGAAGAACAAGIGCGTGAACTTCAATTTTAACGGACTGACCGGAACAGGAGTGCTG
ACCGAGAGCAACAAGAAGTTCCTGCCATTTCAGCAGTTCGGCCGGGACATCGCCGATACCACAGACGCCGTG
AGAGACCCTCAGACCCTGGAGATCCTGGATATCACACCATGTTCTTTCGGAGGAGTGAGCGTGATCACACCA
GGAACCAATACATCCAACCAGGTGGCCGTGCTGTATCAGGACGTGAATTGCACCGAGGTGCCAGTGGCAATC
CACGCAGATCAGCTGACCCCTACATGGAGGGTGTACAGCACCGGCTCCAACGTGTTCCAGACAAGGGCAGGA
TGCCTGATCGGAGCAGAGCACGTGAACAATAGCTATGAGTGTGACATCCCAATCGGAGCAGGAATCTGCGCA
TCCTACCAGACCCAGACAAACTCTCCTGGCAGCGCAAGCTCCGTGGCATCCCAGTCTATCATCGCCTATACC
ATGTCTCTGGGCGCCGAGAATAGCGTGGCCTACTCCAACAATTCTATCGCCATCCCCACCAACTTTACAATC
AGCGTGACCACAGAGATCCTGCCTGTGTCCATGACCAAGACATCTGTGGACTGTACAATGTATATCTGCGGC
GATAGCACCGAGTGTTCCAACCTGCTGCTGCAGTACGGCTCCTTCTGCACCCAGCTGAATAGGGCACTGACA
GGAATCGCAGTGGAGCAGGACAAGAACACACAGGAGGTGTTTGCCCAGGTGAAGCAGATCTACAAGACCCCA
CCCATCAAGGACTTCGGCGGCTTCAATTTTAGCCAGATCCTGCCTGATCCAAGCAAGCCATCCAAGCGGTCT
CCCATCGAGGACCTGCTGTTCAACAAGGTGACCCTGGCCGATGCCGGCTTTATCAAGCAGTATGGCGATTGT
CTGGGCGACATCGCCGCCAGAGACCTGATCTGCGCCCAGAAGTTTAATGGCCTGACCGTGCTGCCTCCACTG
CTGACAGATGAGATGATCGCCCAGTACACATCTGCACTGCTGGCAGGAACCATCACAAGCGGATGGACCTTC
GGAGCAGGACCTGCACTGCAGATCCCCTTCCCTATGCAGATGGCCTATAGATTTAACGGCATCGGCGTGACC
CAGAATGTGCTGTACGAGAACCAGAAGCTGATCGCCAATCAGTTTAACAGCGCCATCGGCAAGATCCAGGAC
TCCCTGTCTAGCACACCATCTGCCCTGGGCAAGCTGCAGGATGTGGTGAATCAGAACGCCCAGGCCCTGAAT
ACCCTGGTGAAGCAGCTGTCCTCTAACTTCGGCGCCATCAGCTCCGTGCTGAATGATATCCTGTCCCGGCTG
GACCCCCCTGAGGCAGAGGTGCAGATCGACCGGCTGATCACAGGCAGACTGCAGTCCCTGCAGACCTACGTG
ACACAGCAGCTGAICAGGGCAGCAGAGATCAGGGCATCTGCAAATCTGGCCGCCACCAAGATGAGCGAGTGT
GTGCTGGGCCAGTCCAAGAGAGTGGACTTCTGCGGCAAGGGCTATCACCTGATGTCTTTTCCTCAGAGCGCA
CCACACGGAGTGGTGTTCCTGCACGIGACCTACGIGCCAGCCCAGGAGAAGAACTTCACCACAGCCCCCGCC
ATCTGTCACGATGGAAAGGCACACTTCCCAAGGGAGGGAGTGTTTGTGTCTAACGGCACCCACIGGITCGTG
ACACAGAGAAATTITTATGAGCCCCAGATCATCACCACAGACAATACATTCGTGTCCGGCAACTGCGATGTG
GTGATCGGCATCGIGAACAATACCGTGTATGATCCCCTGCAGCCTGAGCTGGACTCITTCAAGGAGGAGCTG
GATAAGTACTTTAAGAATCACACCAGCCCCGACGTGGATCTGGGCGACATCAGCGGCATCAATGCCTCCGTG
GTGAACATCCAGAAGGAGATCGACCGGCTGAACGAGGTGGCCAAGAATCTGAACGAGAGCCTGATCGATCTG
CAGGAGCTGGGAAAGTACGGCAGCGGCTCCGGCTCTGGCAGCGGCTCCGGCTCTGGCAGCGGCTCCGGCTCT
GGCAGCGGCTCCGGCTCTGGCAGCGGCTCCGGCTCTGGCAGCATGGAGAATACCACAAGCGGCTTTCTGGGA
CCTCTGCTGGTGCTGCAGGCAGGCTTCTTTCTGCTGACCAGAATCCTGACAATCCCACAGAGCCTGGATTCC
TGGTGGACATCCCTGAACTTCCTGGGAGGAGCACCAACCTGTCCAGGACAGAATTCCAGGTCTCCCACCTCT
AACCACAGCCCTACATCCTGTCCACCCATCTGCCCTGGCTATCGCTGGATGTGTCTGCGGAGATTTATCATC
TTCCTGITTATCCTGCTGCTGTGCCTGATCTTCCTGCIGGTGCTGCTGGACTACCAGGGCATGCTGCCTGTG
TGCCCACTGCTGCCAGGAACCTCTACCACAAGCACAGGCCCTTGTAAGACCTGCACAAATCCAGCCAACGGC
ACCTCCATGTTTCCCTCTTGCTGTTGCACAAAGCCTAGCGATGGCAATTGTACCTGCATCCCAATCCCCICT
AGCTGGGCCTTTGCACGGTTCCTGTGGGAGTGGGCATCCGTGAGATTCTCCIGGCTGTCTTTTCTGGTGCCT
TTCGTGCAGTGGTTTGTGGGCCTGAGCCCAACCGTGTGGCTGTCCGTGATGIGGATGATGTGGTATTGGGGC
CCCTCTCTGTACAACATCCTGAGCCCTTTCCTGCCACTGCTGCCCATCTTCTTTTGCCTGTGGGTGTACATC
TGA

[0107] In some aspects, the nucleic acid molecule encoding the fusion protein as described herein comprises or consists of a DNA sequence at least 80% (such as at least 90%, at least 95%, at least 96%, at least 97%, at least 98%, or at least 99%) identical to SEQ ID NO: 13 that encodes a fusion protein set forth as SEQ ID NO: 10, or the complement thereof, or a corresponding RNA sequence or the complement thereof. In some aspects, the nucleic acid encoding the fusion protein as described herein comprises or consists of a DNA sequence set forth as SEQ ID NO: 13, or the complement thereof, or a corresponding RNA sequence or the complement thereof.

[0108] In some aspects, the nucleic acid molecule encoding the fusion protein as described herein comprises or consists of a DNA sequence at least 80% (such as at least 90%, at least 95%, at least 96%, at least 97%, at least 98%, or at least 99%) identical to SEQ ID NO: 14 that encodes a fusion protein set forth as SEQ ID NO: 11, or the complement thereof, or a corresponding RNA sequence or the complement thereof. In some aspects, the nucleic acid encoding the fusion protein as described herein comprises or consists of a DNA sequence set forth as SEQ ID NO: 14, or the complement thereof, or a corresponding RNA sequence or the complement thereof.

[0109] In some aspects, the nucleic acid molecule encoding the fusion protein as described herein comprises or consists of a DNA sequence at least 80% (such as at least 90%, at least 95%, at least 96%, at least 97%, at least 98%, or at least 99%) identical to SEQ ID NO: 15 that encodes a fusion protein set forth as SEQ ID NO: 12, or the complement thereof, or a corresponding RNA sequence or the complement thereof. In some aspects, the nucleic acid encoding the fusion protein as described herein comprises or consists of a DNA sequence set forth as SEQ ID NO: 15, or the complement thereof, or a corresponding RNA sequence or the complement thereof.

### B. Nucleic Acid Molecules Encoding Coronavirus S Ectodomain—HBsAg Fusion Proteins

[0110] Also disclosed herein are nucleic acid molecules encoding a fusion protein comprising a recombinant Coronavirus S ectodomain other than a SARS-CoV-2 S ectodomain, such as SARS-CoV-1, MERS-CoV, 229E, NL63, OC43, or HKU1 S ectodomain, fused via a peptide linker to a HBsAg protein. Briefly, the recombinant Coronavirus S ectodomain is swapped with the SARS-CoV-2 S ectodomain in the fusion protein described above. When expressed in mammalian cells (for example, by administration to a mammalian subject), the fusion protein self-assembles to form a HBsAg nanoparticle with Coronavirus S ectodomain trimers (e.g., SARS-CoV-1, MERS-CoV, 229E, NL63, OC43, or HKU1 S ectodomain trimers) extending radially outward from an outer surface of the HBsAg nanoparticle. The Coronavirus S ectodomain (such as SARS-CoV-1, MERS-CoV, 229E, NL63, OC43, or HKU1 S ectodomain) can be constructed by swapping the Coronavirus S ectodomain (such as SARS-CoV-1, MERS-CoV, 229E, NL63, OC43, or HKU1 S ectodomain) for the SARS-CoV-2 ectodomain in the SARS-CoV-2-HBsAg fusion proteins described herein.

[0111] The recombinant Coronavirus S ectodomain (such as SARS-CoV-1, MERS-CoV, 229E, NL63, OC43, or HKU1 S ectodomain) included in the fusion protein is stabilized in a prefusion conformation by one or more amino acid substitutions. In some aspects, the recombinant Coronavirus S ectodomain (such as SARS-CoV-1, MERS-CoV, 229E, NL63, OC43, or HKU1 S ectodomain) included in the fusion protein is stabilized in a prefusion conformation by the “6P” mutations (e.g., for SARS-CoV-1, MERS-CoV S) or “5P” mutations (e.g., for 229E, NL63, OC43 and HKU1 S). The “6P” proline mutations are equivalent to F817P, A892P, A899P, A942P, K986P, and V987P relative to the SARS-CoV-2 sequence provided as SEQ ID NO: 1. The “5P” proline mutations are equivalent to F817P, A899P, A942P, K986P, and V987P relative to the SARS-CoV-2 sequence provided as SEQ ID NO: 1. The locations of the relevant positions for the substitutions can be identified by sequence and structure alignment of the Coronavirus S ectodomain (e.g., SARS-CoV-1, MERS-CoV, 229E, NL63, OC43, or HKU1 S ectodomain) with the corresponding SARS-CoV-2 S ectodomain set forth as SEQ ID NO: 1; further, examples of SARS-CoV-1, MERS-CoV, 229E, NL63, OC43, and HKU1 S ectodomain sequences with the “6P” or “5P” mutations are provided herein.

[0112] In some aspects, the recombinant SARS-CoV-1 S ectodomain included in the fusion protein is a single-chain SARS-CoV-1 S ectodomain including a mutation of the S1/S2 protease cleavage site to prevent cleavage and formation of distinct S1 and S2 polypeptide chains. Examples of the mutation can be but are not limited to glycine, serine or alanine substitution. In some aspects, the S1 and S2 polypeptides in the single chain SARS-CoV-1 S ectodomain are joined by a linker, such as a peptide linker. Examples of peptide linkers that can be used include glycine, serine, and glycine-serine linkers. Examples of SARS-CoV-1, MERS-CoV, 229E, NL63, OC43, and HKU1 S ectodomain sequences containing a mutated S1/S2 with or without a mutated S2 cleavage site are provided herein. Any of the prefusion stabilizing mutations (or combinations thereof) disclosed herein can be included in the single chain SARS-CoV-2 S ectodomain.

>SARS S6P ectodomain,
SEQ ID NO: 322
MFIFLLFLTLTSGSDLDRCTTEDDVQAPNYTQHTSSMRGVYYPDEIFRSDTLYLTQDLFLPFYSNVTGEHTI
NHTFGNPVIPFKDGIYFAATEKSNVVRGWVFGSTMNNKSQSVIIINNSTNVVIRACNFELCDNPFFAVSKPM
GTQTHTMIFDNAFNCTFEYISDAFSLDVSEKSGNFKHLREFVEKNKDGFLYVYKGYQPIDVVRDLPSGENTL
KPIFKLPLGINITNFRAILTAFSPAQDIWGTSAAAYFVGYLKPTTFMLKYDENGTITDAVDCSQNPLAELKC
SVKSFEIDKGIYQTSNFRVVPSGDVVRFPNITNLCPFGEVENATKFPSVYAWERKKISNCVADYSVLYNSTE
FSTFKCYGVSATKLNDLCFSNVYADSFVVKGDDVRQIAPGQTGVIADYNYKLPDDEMGCVLAWNTRNIDATS
TGNYNYKYRYLRHGKLRPFERDISNVPFSPDGKPCTPPALNCYWPLNDYGFYTTTGIGYQPYRVVVLSFELL
NAPATVCGPKLSTDLIKNQCVNFNENGLIGTGVLTPSSKRFQPFQQFGRDVSDFTDSVRDPKTSEILDISPC
AFGGVSVITPGTNASSEVAVLYQDVNCTNVSAAIHADQLTPAWRIYSTGNNVFQTQAGCLIGAEHVDTSYEC
DIPIGAGICASYHTVSLLRSTSQKSIVAYTMSLGADSSIAYSNNTIAIPTNFSISITTEVMPVSMAKTSVDC
NMYICGDSTECANLLLQYGSFCTQLNRALSGIAAEQDRNTREVFAQVKQMYKTPTLKYFGGFNFSQILPDPL
KPTKRSPIEDLLFNKVTLADAGEMKQYGECLGDINARDLICAQKENGLTVLPPLLIDDMIAAYTAALVSGTA
TAGWTFGAGPALQIPFPMQMAYRENGIGVTQNVLYENQKQIANQFNKAISQIQESLITTPTALGKLQDVVNQ
NAQALNTLVKQLSSNFGAISSVLNDILSRLDPPEAEVQIDRLITGRLQSLQTYVTQQLIRAAEIRASANLAA
TKMSECVLGQSKRVDFCGKGYHLMSFPQAAPHGVVFLHVTYVPSQERNFTTAPAICHEGKAYFPREGVEVEN
GTSWFITQRNFFSPQIITTDNTFVSGNCDVVIGIINNTVYDPLQPELDSFKGELDKYFKNHTSPDVDLGDIS
GINASVVNIQKEIDRLNEVAKNLNESLIDLQELGKY
>MERS S6P ectodomain,
SEQ ID NO: 323
MIHSVFLLMFLLTPTESYVDVGPDSVKSACIEVDIQQTFFDKTWPRPIDVSKADGIIYPQGRTYSNITITYQ
GLFPYQGDHGDMYVYSAGHATGTTPQKLFVANYSQDVKQFANGFVVRIGAAANSIGTVIISPSTSATIRKIY
PAFMLGSSVGNFSDGKMGRFFNHTLVLLPDGCGTLLRAFYCILEPRSGNHCPAGNSYTSFATYHTPATDCSD
GNYNRNASLNSFKEYFNLRNCTFMYTYNITEDEILEWFGITQTAQGVHLFSSRYVDLYGGNMFQFATLPVYD
TIKYYSIIPHSIRSIQSDRKAWAAFYVYKLQPLTELLDESVDGYIRRAIDCGENDLSQLHCSYESEDVESGV
YSVSSFEAKPSGSVVEQAEGVECDESPLLSGTPPQVYNFKRLVFINCNYNLTKLLSLFSVNDFTCSQISPAA
IASNCYSSLILDYFSYPLSMKSDLSVSSAGPISQFNYKQSFSNPTCLILATVPHNLTTITKPLKYSYINKCS
RLLSDDRTEVPQLVNANQYSPCVSIVPSTVWEDGDYYRKQLSPLEGGGWLVASGSTVAMTEQLQMGFGITVQ
YGTDTNSVCPKLEFANDTKIASQLGNCVEYSLYGVSGRGVFQNCTAVGVRQQRFVYDAYQNLVGYYSDDGNY
YCLRACVSVPVSVIYDKETKTHATLFGSVACEHISSTMSQYSRSTRSMLKRRDSTYGPLQTPVGCVLGLVNS
SLFVEDCKLPLGQSLCALPDTPSTLTPRSVRVPGEMRLASIAFNHPIQVDQLNSSYFKLSIPTNFSFGVTQE
YIQTTIQKVTVDCKQYVCNGFQKCEQLLREYGQFCSKINQALHGANLRQDDSVRNLFASVKSSQSSPIIPGE
GGDENLILLEPVSISTGSRSAPSAIEDLLEDKVTIADPGYMQGYDDCMQQGPASARDLICAQYVAGYKVLPP
LMDVNMEAAYTSSLLGSIAGVGWPAGLSSFAAPPFAQSIFYRLNGVGITQQVLSENQKLIANKENQALGAMQ
TGFTTTPEAFQKVQDAVNNNAQALSKLASELSNTFGAISASIGDIIQRLDPPEQDAQIDRLINGRLTTLNAF
VAQQLVRSESAALSAQLAKDKVNECVKAQSKRSGFCGQGTHIVSEVVNAPNGLYFMHVGYYPSNHIEVVSAY
GLCDAANPTNCIAPVNGYFIKTNNTRIVDEWSYTGSSFYAPEPITSLNTKYVAPQVTYQNISTNLPPPLLGN
STGIDFQDELDEFFKNVSTSIPNFGSLTQINTILLDLTYEMLSLQQVVKALNESYIDLKELGNYTYYNK
>229E (GenBank: ABB90529.1) S5P ectodomain,
SEQ ID NO: 324
MFVLLVAYALLHIAGCQTTNGMNTSHSVCNGCVGHSENVFAVESGGYIPSNFAFNNWELLINTSSVVDGVVR
SFQPLLLNCLWSVSGSRLTTGFVYFNGTGRGACKGFYSNASSDVIRYNINFEENLRRGTILFKTSYGAVVFY
CTNNTLVSGDAHIPSGTVLGNFYCFVNITIGNETTSAFVGALPKIVREFVISRTGHFYINGYRYFSLGNVEA
VNFNVTNAATTVCTVALASYADVLVNVSQTAIANIIYCNSVINRLRCDQLSFDVPDGFYSTSPIQSVELPVS
IVSLPVYHKHTFIVLYVNFELRRGPGRCYNCRPAVVNITLANFNETKGPLCVDTSHFTTQFFGVKFDRWSAS
INTGNCPFSFGKVNNFVKFGSVCFSLKDIPGGCAMPIMANLANLNSHNIGSLYVSWSDGDVITGVPKPVEGV
SSFMNVTLNKCTKYNIYDVSGVGVIRISNDTFLNGITYTSTSGNLLGFKDVINGTIYSITPCNPPDQLVVYQ
QAVVGAMLSENFTSYGESNVVEMPKFFYASNGTYNCTDAVLTYSSFGVCADGSIIAVQPRNVSYDSVSAIVT
ANLSIPSNWTTSVQVEYLQITSTPIVVDCSTYVCNGNVRCVELLKQYTSACKTIEDALRNSAMLESADVSEM
LTFDKKAFTLANVSSFGDYNLSSVIPSLPRSGSRVPGRSAIEDILFSKLVTSGLGTVDADYKKCTKGLSIAD
LACAQYYNGIMVLPGVADAERMAMYTGSLIGGIALGGLTSPASIPFSLAIQSRLNYVALQTDVLQENQKILA
ASFNKAMTNIVDAFTGVNDPITQTSQALQTVATALNKIQDVVNQQGNSLNHLTSQLRQNFQAISSSIQAIYD
RLDPPQADQQVDRLITGRLAALNVFVSHTLTKYTEVRASRQLAQQKVNECVKSQSKRYGFCGNGTHIFSLVN
AAPEGLVFLHTVLLPTQYKDVEAWSGLCVDGRNGYVLRQPNLALYKEGNYYRITSRIMFEPRIPTIADEVQI
ENCNVTFVNISRSELQTIVPEYIDVNKTLQELSYKLPNYTVPDLVVEQYNQTILNLTSEISTLENKSAELNY
TVQKLQTLIDNINSTLVDLKWLNRVETYIKWP
>NL63 (GenBank: APF29063.1) S5P ectodomain,
SEQ ID NO: 325
MKLFLILLVLPLASCFFTCNSNANLSMLQLGVPDNSSTIVTGLLPTHWECANQSTSVYSANGFFYIDVGNHR
SAFALHTGYYDVNQYYIYVINEIGLNASVTLKICKFGINTTFDFLSNSSSSFDCIVNLLFTEQLGAPLGITI
SGETVRLHLYNVTRTFYVPAAYKLIKLSVKCYFNYSCVFSVVNATVTVNVTTHNGRVVNYTVCDDCNGYTDN
IFSVQQDGRIPNGFPFNNWFLLINGSTLVDGVSRLYQPLRLTCLWPVPGLKSSTGFVYFNATGSDVNCNGYQ
HNSVADVMRYNLNFSANSVDNLKSGVIVEKTLQYDVLFYCSNSSSGVLDTTIPFGPSSQPYYCFINSTINTT
HVSTFVGILPPTVREIVVARTGQFYINGFKYFDLGFIEAVNENVITASATDFWTVAFATFVDVLVNVSATKI
QNLLYCDSPFEKLQCEHLQFGLQDGEYSANFLDDNVLPETYVALPIYYQHTDINFTATASFGGSCYVCKPHQ
VNISLNGNTSVCVRTSHFSIRYIYNRVKSGSPGDSSWHIYLKSGTCPFSFSKLNNFQKFKTICESTVEVPGS
CNFPLEATWHYTSYTIVGALYVTWSEGNSITGVPYPVSGIREFSNLVLNNCTKYNIYDYVGTGIIRSSNQSL
AGGITYVSNSGNLLGFKNVSTGNIFIVTPCNQPDQVAVYQQSIIGAMTAVNESRYGLQNLLQLPNFYYVSNG
GNNCTTAVMTYSNFGICADGSLIPVRPRNSSDNGISAIITANLSIPSNWTTSVQVEYLQITSTPIVVDCATY
VCNGNPRCKNLLKQYTSACKTIEDALRLSAHLETNDVSSMLTFDSNAFSLANVTSFGDYNLSSVLPQRNIRS
SRIAGRSPLEDLLESKVVTSGLGTVDVDYKSCTKGLSIADLACAQYYNGIMVLPGVADAERMAMYTGSLIGG
MVLGGLISAPAIPFSLALQARLNYVALQTDVLQENQKILAASENKAINNIVASFSSVNDPITQTAEAIHTVT
IALNKIQDVVNQQGSALNHLTSQLRHNFQAISNSIQAIYDRLDPPQADQQVDRLITGRLAALNAFVSQVLNK
YTEVRSSRRLAQQKVNECVKSQSNRYGFCGNGTHIFSIVNSAPDGLLFLHTVLLPTDYKNVKAWSGICVDGI
YGYVLRQPNLVLYSDNGVFRVTSRIMFQPRLPVLSDFVQIYNCNVTFVNISRVELHTVIPDYVDVNKTLQEF
AQNLPKYVKPNFDLTPFNLTYLNLSSELKQLEAKTASLFQTTVELQGLIDQINSTYVDLKLLNRFENYIKWP
>OC43 (GenBank: AIX10763.1) S5P ectodomain,
SEQ ID NO: 326
MFLILLISLPTAFAVIGDLNCPLDPKLKGSENNRDIGSPSISTDTVDVINGLGTYYVLDRVYLNTTLFLNGY
YPTSGSTYRNMALKGTDLLSTLWFKPPFLSDFINGIFAKVKNTKVFKDGVMYSEFPAITIGSTEVNTSYSVV
VQPRTINSTQDGVNKLQGLLEVSVCQYNMCEHPHTICHPNLGNHEKELWHLDTGVVSCLYKRNETYDVNATY
LYFHFYQEGGTFYAYFTDTGFVTKFLFNVYLGMALSHYYVMPLTCISRRDIGFTLEYWVTPLTPRQYLLAEN
QDGIIFNAVDCMSDFMSEIKCKTQSIAPPTGVYELNGYTVQPIADVYRRKPDLPNCNIEAWLNDKSVPSPLN
WERKTFSNCNFNMSSLMSFIQADSFTCNNIDAAKIYGMCFSSITIDKFAIPNRRKVDLQLGNLGYLQSSNYR
IDTTATSCQLYYNLPAANVSVSRENPSTWNKRFGFIEDSVFVPQPTGVFTNHSVVYAQHCFKAPKNFCPCSS
CPGKNNGIGTCPAGINSLTCDNLCTLDPITFKAPDTYKCPQTKSLVGIGEHCSGLAVKSDYCGNNSCTCQPQ
AFLGWSADSCLQGDKCNIFANFILHDVNNGLTCSTDLQKANTEIELGVCVNYDLYGISGQGIFVEVNATYYN
SWQNLLYDSNGNLYGFRDYITNRTFMIHSCYSGRVSAAYHANSPEPALLFRNIKCNYVENNSLTRQLQPINY
SFDSYLGCVVNAYNSTAISVQTCDLTVGSGYCVDYSKNRRSRRAITTGYRFTNFEPFTVNSVNDSLEPVGGL
YEIQIPSEFTIGNMEEFIQTSSPKVTIDCAAFVCGDYAACKLQLVEYGSFCDNINAILTEVNELLDTTQLQV
ANSLMNGVTLSTKLKDGVNFNVDDINFSPVLGCLGSECSKPSSRSAIEDLLEDKVKLSDVGFVEAYNNCTGG
AEIRDLICVQSYKGIKVLPPLLSENQISGYTLAATSASLFPPWTAPAGVPFYLNVQYRINGLGVTMDVLSQN
QKLIANAFNNALHAIQQGEDPTNSALVKIQAVVNANSEALNNLLQQLSNRFGAISASLQEILSRLDPPEAEA
QIDRLINGRLTALNAYVSQQLSDSTLVKFSAAQAMEKVNECVKSQSSRINFCGNGNHIISLVQNAPYGLYFI
HFNYVPTKYVTAKVSPGLCIAGNRGIAPKSGYFVNVNNTWMYTGSGYYYPEPITENNVVVMSTCAVNYTKAP
YVMLNTSIPNLPDFKEELGQWFKNQTSVAPDLSLDYINVTFLDLQVEMNRLQEAIKVLNHSYINLKDIGTYE
YYVKWP
>HKU1 (GenBank: AGW27881.1) S5P ectodomain,
SEQ ID NO: 327
MLLIIFILPTTLAVIGDENCTNFAINDKNTTVPRISEYVVDVSYGLGTYYILDRVYLNTTILFTGYFPKSGA
NERDLSLKGTTYLSTLWYQKPFLSDENNGIFSRVKNTKLYVNKTLYSEFSTIVIGSVFINNSYTIVVQPHNG
VLEITACQYTMCEYPHTICKSKGSSRNESWHFDKSEPLCLFKKNFTYNVSTDFLYFHFYQERGTFYAYYADS
GMPTTFLESLYLGILLSHYYVLPLTCNAISSNTDNETLQYWVTPLSKRQYLLKFDNRGVITNAVDCSSSFFS
EIQCKTKSLLPNTGVYDLSGFTVKPVATVHRRIPDLPDCDIDKWLNNENVPSPLNWERKIFSNCNENLSTLL
RLVHTDSFSCNNFDESKIYGSCFKSIVLDKFAIPNSRRSDLQLGSSGFLQSSNYKIDTTSSSCQLYYSLPAI
NVTINNYNPSSWNRRYGENNENLSSHSVVYSRYCFSVNNTFCPCAKPSFASSCKSHKPPSASCPIGINYRSC
ESTTVLDHTDWCRCSCLPDPITAYDPRSCSQKKSLVGVGEHCAGFGVDEEKCGVLDGSYNVSCLCSTDAFLG
WSYDTCVSNNRCNIFSNFILNGINSGTTCSNDLLQPNTEVYTDVCVDYDLYGITGQGIFKEVSAVYYNSWQN
LLYDSNGNIIGFKDFVTNKTYNIFPCYAGRVSAAFHQNASSLALLYRNLKCSYVLNNISLATQPYEDSYLGC
VFNADNLTDYSVSSCALRMGSGFCVDYNSPSESSSRRKRRSISASYRFVTFEPFNVSFVNDSIESVGGLYEI
KIPTNFTIVGQEEFIQTNSPKVTIDCSLFVCSNYAACHDLLSEYGTFCDNINSILDEVNGLLDITQLHVADT
LMQGVTLSSNLNTNLHEDVDNINFKSLVGCLGPHCGSPSRSFFEDLLEDKVKLSDVGFVEAYNNCTGGSEIR
DLLCVQSENGIKVLPPILSESQISGYTTAATVAAMFPPWSAPAGIPFSLNVQYRINGLGVTMDVLNKNQKLI
ATAFNNALLSIQNGFSPINSALAKIQSVVNSNAQALNSLLQQLENKFGAISSSLQEILSRLDPPEAQVQIDR
LINGRLTALNAYVSQQLSDISLVKFGAALAMEKVNECVKSQSPRINFCGNGNHILSLVQNAPYGLLEMHESY
KPISFKTVLVSPGLCISGDVGIAPKQGYFIKHNDHWMFTGSSYYYPEPISDKNVVEMNTCSVNFTKAPLVYL
NHSVPKLSDFESELSHWFKNQTSIAPNLILNLHTINATELDLYYEMNLIQESIKSLNNSYINLKDIGTYEMY
VKWP

[0113] In some aspects, the Coronavirus S ectodomain further includes one or more mutations to eliminate protease cleavage sites. Exemplary sequences of recombinant SARS-CoV-1, MERS-CoV, 229E, NL63, OC43, and HKU′1 S proteins including the 6P or 5P substitutions for prefusion stabilization and S1/S2 with or without S2 protease cleavage site mutations for inclusion in the fusion protein are provided as:

>SARS-COV-1 S6P,
SEQ ID NO: 328
MFIFLLFLTLTSGSDLDRCTTFDDVQAPNYTQHTSSMRGVYYPDEIFRSDTLYLTQDLFLPFYSNVTGEHTI
NHTFGNPVIPFKDGIYFAATEKSNVVRGWVFGSIMNNKSQSVIIINNSINVVIRACNFELCDNPFFAVSKPM
GTQTHTMIFDNAFNCTFEYISDAFSLDVSEKSGNEKHLREFVEKNKDGFLYVYKGYQPIDVVRDLPSGENTL
KPIFKLPLGINIINFRAILTAFSPAQDIWGTSAAAYFVGYLKPTTFMLKYDENGTITDAVDCSQNPLAELKC
SVKSFEIDKGIYQTSNERVVPSGDVVRFPNITNLCPFGEVENATKFPSVYAWERKKISNCVADYSVLYNSTE
FSTFKCYGVSATKLNDLCFSNVYADSFVVKGDDVRQIAPGQTGVIADYNYKLPDDEMGCVLAWNTRNIDATS
TGNYNYKYRYLRHGKLRPFERDISNVPFSPDGKPCTPPALNCYWPLNDYGFYTTTGIGYQPYRVVVLSFELL
NAPATVCGPKLSTDLIKNQCVNFNFNGLTGTGVLTPSSKRFQPFQQFGRDVSDFTDSVRDPKISEILDISPC
AFGGVSVITPGTNASSEVAVLYQDVNCTNVSAAIHADQLTPAWRIYSTGNNVFQTQAGCLIGAEHVDTSYEC
DIPIGAGICASYHTVSLLSSTSQKSIVAYTMSLGADSSIAYSNNIIAIPINESISITTEVMPVSMAKTSVDC
NMYICGDSTECANLLLQYGSFCTQLNRALSGIAAEQDRNTREVFAQVKQMYKTPTLKYFGGENFSQILPDPL
KPTKRSPIEDLLFNKVTLADAGFMKQYGECLGDINARDLICAQKENGLIVLPPLLIDDMIAAYTAALVSGTA
TAGWTFGAGPALQIPFPMQMAYRENGIGVTQNVLYENQKQIANQFNKAISQIQESLITTPTALGKLQDVVNQ
NAQALNTLVKQLSSNFGAISSVLNDILSRLDPPEAEVQIDRLITGRLQSLQTYVTQQLIRAAEIRASANLAA
TKMSECVLGQSKRVDFCGKGYHLMSFPQAAPHGVVFLHVTYVPSQERNETTAPAICHEGKAYFPREGVEVEN
GTSWFITQRNFFSPQIITTDNTFVSGNCDVVIGIINNTVYDPLQPELDSEKGELDKYFKNHTSPDVDLGDIS
GINASVVNIQKEIDRLNEVAKNLNESLIDLQELGKY
>MERS-COV S6P,
SEQ ID NO: 329
MIHSVFLLMFLLTPTESYVDVGPDSVKSACIEVDIQQTFFDKTWPRPIDVSKADGIIYPQGRTYSNITITYQ
GLFPYQGDHGDMYVYSAGHATGTTPQKLFVANYSQDVKQFANGFVVRIGAAANSIGTVIISPSTSATIRKIY
PAFMLGSSVGNFSDGKMGRFFNHTLVLLPDGCGTLLRAFYCILEPRSGNHCPAGNSYTSFATYHTPATDCSD
GNYNRNASLNSFKEYFNLRNCTFMYTYNITEDEILEWFGITQTAQGVHLESSRYVDLYGGNMFQFATLPVYD
TIKYYSIIPHSIRSIQSDRKAWAAFYVYKLQPLTFLLDESVDGYIRRAIDCGENDLSQLHCSYESEDVESGV
YSVSSFEAKPSGSVVEQAEGVECDFSPLLSGTPPQVYNFKRLVFINCNYNLIKLLSLFSVNDFTCSQISPAA
IASNCYSSLILDYFSYPLSMKSDLSVSSAGPISQFNYKQSFSNPICLILATVPHNLITITKPLKYSYINKCS
RLLSDDRTEVPQLVNANQYSPCVSIVPSTVWEDGDYYRKQLSPLEGGGWLVASGSTVAMTEQLQMGFGITVQ
YGTDTNSVCPKLEFANDTKIASQLGNCVEYSLYGVSGRGVFQNCTAVGVRQQRFVYDAYQNLVGYYSDDGNY
YCLRACVSVPVSVIYDKETKTHATLEGSVACEHISSTMSQYSRSTRSMLKRRDSTYGPLQTPVGCVLGLVNS
SLFVEDCKLPLGQSLCALPDTPSTLTPASVGSVPGEMRLASIAFNHPIQVDQLNSSYFKLSIPTNFSFGVTQ
EYIQTTIQKVTVDCKQYVCNGFQKCEQLLREYGQFCSKINQALHGANLRQDDSVRNLFASVKSSQSSPIIPG
FGGDENLILLEPVSISTGSASAPSAIEDLLFDKVTIADPGYMQGYDDCMQQGPASARDLICAQYVAGYKVLP
PLMDVNMEAAYTSSLLGSIAGVGWPAGLSSFAAPPFAQSIFYRLNGVGITQQVLSENQKLIANKENQALGAM
QTGFTTTPEAFQKVQDAVNNNAQALSKLASELSNIFGAISASIGDIIQRLDPPEQDAQIDRLINGRLTTLNA
FVAQQLVRSESAALSAQLAKDKVNECVKAQSKRSGFCGQGTHIVSFVVNAPNGLYFMHVGYYPSNHIEVVSA
YGLCDAANPTNCIAPVNGYFIKINNTRIVDEWSYTGSSFYAPEPITSLNTKYVAPQVTYQNISINLPPPLLG
NSTGIDFQDELDEFFKNVSTSIPNFGSLTQINTTLLDLTYEMLSLQQVVKALNESYIDLKELGNYTYYNK
>229E S5P (Based on GenBank: ABB90529.1),
SEQ ID NO: 330
MFVLLVAYALLHIAGCQTTNGMNTSHSVCNGCVGHSENVFAVESGGYIPSNFAFNNWFLLTNTSSVVDGVVR
SFQPLLLNCLWSVSGSRLTTGFVYFNGTGRGACKGFYSNASSDVIRYNINFEENLRRGTILFKTSYGAVVFY
CTNNTLVSGDAHIPSGTVLGNFYCFVNTTIGNETTSAFVGALPKTVREFVISRTGHFYINGYRYFSLGNVEA
VNFNVTNAATTVCTVALASYADVLVNVSQTAIANIIYCNSVINRLRCDQLSEDVPDGFYSTSPIQSVELPVS
IVSLPVYHKHIFIVLYVNFELRRGPGRCYNCRPAVVNITLANFNETKGPLCVDTSHFTTQFFGVKFDRWSAS
INTGNCPFSFGKVNNFVKFGSVCFSLKDIPGGCAMPIMANLANLNSHNIGSLYVSWSDGDVITGVPKPVEGV
SSFMNVTLNKCTKYNIYDVSGVGVIRISNDTFLNGITYTSTSGNLLGFKDVINGTIYSITPCNPPDQLVVYQ
QAVVGAMLSENFTSYGFSNVVEMPKFFYASNGTYNCTDAVLTYSSFGVCADGSIIAVQPGNVSYDSVSAIVT
ANLSIPSNWTTSVQVEYLQITSTPIVVDCSTYVCNGNVRCVELLKQYTSACKTIEDALRNSAMLESADVSEM
LTFDKKAFTLANVSSFGDYNLSSVIPSLPRSGSGVPGSSAIEDILFSKLVTSGLGTVDADYKKCTKGLSIAD
LACAQYYNGIMVLPGVADAERMAMYTGSLIGGIALGGLISPASIPESLAIQSRLNYVALQTDVLQENQKILA
ASFNKAMTNIVDAFTGVNDPITQTSQALQTVATALNKIQDVVNQQGNSLNHLTSQLRQNFQAISSSIQAIYD
RLDPPQADQQVDRLITGRLAALNVFVSHTLTKYTEVRASRQLAQQKVNECVKSQSKRYGFCGNGTHIFSLVN
AAPEGLVFLHTVLLPTQYKDVEAWSGLCVDGRNGYVLRQPNLALYKEGNYYRITSRIMFEPRIPTIADFVQI
ENCNVTEVNISRSELQTIVPEYIDVNKTLQELSYKLPNYTVPDLVVEQYNQTILNLTSEISTLENKSAELNY
TVQKLQTLIDNINSTLVDLKWLNRVETYIKWP
>NL63 (GenBank: APF29063.1),
SEQ ID NO: 331
MKLFLILLVLPLASCEFTCNSNANLSMLQLGVPDNSSTIVTGLLPTHWFCANQSTSVYSANGFFYIDVGNHR
SAFALHTGYYDVNQYYIYVTNEIGLNASVTLKICKFGINTTFDFLSNSSSSFDCIVNLLFTEQLGAPLGITI
SGETVRLHLYNVTRTFYVPAAYKLTKLSVKCYFNYSCVFSVVNATVTVNVTTHNGRVVNYTVCDDCNGYTDN
IFSVQQDGRIPNGFPFNNWELLINGSTLVDGVSRLYQPLRLTCLWPVPGLKSSTGFVYFNATGSDVNCNGYQ
HNSVADVMRYNLNFSANSVDNLKSGVIVEKTLQYDVLFYCSNSSSGVLDTTIPFGPSSQPYYCFINSTINTT
HVSTFVGILPPTVREIVVARTGQFYINGFKYFDLGFIEAVNENVITASATDEWTVAFATFVDVLVNVSATKI
QNLLYCDSPFEKLQCEHLQFGLQDGFYSANFLDDNVLPETYVALPIYYQHTDINFTATASFGGSCYVCKPHQ
VNISLNGNTSVCVRTSHESIRYIYNRVKSGSPGDSSWHIYLKSGTCPFSFSKLNNFQKFKTICESTVEVPGS
CNFPLEATWHYTSYTIVGALYVTWSEGNSITGVPYPVSGIREFSNLVLNNCTKYNIYDYVGTGIIRSSNQSL
AGGITYVSNSGNLLGFKNVSTGNIFIVTPCNQPDQVAVYQQSIIGAMTAVNESRYGLQNLLQLPNFYYVSNG
GNNCTTAVMTYSNFGICADGSLIPVGPGNSSDNGISAIITANLSIPSNWTTSVQVEYLQITSTPIVVDCATY
VCNGNPRCKNLLKQYTSACKTIEDALRLSAHLETNDVSSMLTEDSNAFSLANVTSFGDYNLSSVLPQRNIGS
SGIAGSSPLEDLLESKVVTSGLGTVDVDYKSCTKGLSIADLACAQYYNGIMVLPGVADAERMAMYTGSLIGG
MVLGGLISAPAIPFSLALQARLNYVALQTDVLQENQKILAASENKAINNIVASFSSVNDPITQTAEAIHTVT
IALNKIQDVVNQQGSALNHLTSQLRHNFQAISNSIQAIYDRLDPPQADQQVDRLITGRLAALNAFVSQVLNK
YTEVRSSRRLAQQKVNECVKSQSNRYGFCGNGTHIFSIVNSAPDGLLFLHTVLLPTDYKNVKAWSGICVDGI
YGYVLRQPNLVLYSDNGVERVTSRIMFQPRLPVLSDFVQIYNCNVTFVNISRVELHTVIPDYVDVNKTLQEF
AQNLPKYVKPNFDLTPFNLTYLNLSSELKQLEAKTASLFQTTVELQGLIDQINSTYVDLKLLNRFENYIKWP
>OC43 (GenBank: AIX10763.1),
SEQ ID NO: 332
MFLILLISLPTAFAVIGDLNCPLDPKLKGSENNRDTGSPSISTDTVDVINGLGTYYVLDRVYLNTTLFLNGY
YPTSGSTYRNMALKGTDLLSTLWFKPPFLSDFINGIFAKVKNTKVFKDGVMYSEFPAITIGSTEVNTSYSVV
VQPRTINSTQDGVNKLQGLLEVSVCQYNMCEHPHTICHPNLGNHFKELWHLDTGVVSCLYKRNFTYDVNATY
LYFHFYQEGGTFYAYFTDTGFVTKFLFNVYLGMALSHYYVMPLTCISRRDIGFTLEYWVTPLTPRQYLLAEN
QDGIIFNAVDCMSDFMSEIKCKTQSIAPPTGVYELNGYTVQPIADVYRRKPDLPNCNIEAWLNDKSVPSPLN
WERKTFSNCNFNMSSLMSFIQADSFTCNNIDAAKIYGMCFSSITIDKFAIPNRRKVDLQLGNLGYLQSSNYR
IDTTATSCQLYYNLPAANVSVSRENPSTWNKRFGFIEDSVFVPQPTGVFTNHSVVYAQHCFKAPKNFCPCSS
CPGKNNGIGTCPAGTNSLTCDNLCTLDPITFKAPDTYKCPQTKSLVGIGEHCSGLAVKSDYCGNNSCTCQPQ
AFLGWSADSCLQGDKCNIFANFILHDVNNGLTCSTDLQKANTEIELGVCVNYDLYGISGQGIFVEVNATYYN
SWQNLLYDSNGNLYGFRDYITNRTFMIHSCYSGRVSAAYHANSPEPALLFRNIKCNYVENNSLTRQLQPINY
SFDSYLGCVVNAYNSTAISVQTCDLTVGSGYCVDYSKNSGSGSAITTGYRFTNFEPFTVNSVNDSLEPVGGL
YEIQIPSEFTIGNMEEFIQTSSPKVTIDCAAFVCGDYAACKLQLVEYGSFCDNINAILTEVNELLDTTQLQV
ANSLMNGVTLSTKLKDGVNFNVDDINFSPVLGCLGSECSKPSSASAIEDLLEDKVKLSDVGFVEAYNNCIGG
AEIRDLICVQSYKGIKVLPPLLSENQISGYTLAATSASLFPPWTAPAGVPFYLNVQYRINGLGVTMDVLSQN
QKLIANAFNNALHAIQQGFDPTNSALVKIQAVVNANSEALNNLLQQLSNRFGAISASLQEILSRLDPPEAEA
QIDRLINGRLTALNAYVSQQLSDSTLVKFSAAQAMEKVNECVKSQSSRINFCGNGNHIISLVQNAPYGLYFI
HFNYVPTKYVTAKVSPGLCIAGNRGIAPKSGYFVNVNNTWMYTGSGYYYPEPITENNVVVMSTCAVNYTKAP
YVMLNTSIPNLPDFKEELGQWFKNQTSVAPDLSLDYINVTELDLQVEMNRLQEAIKVLNHSYINLKDIGTYE
YYVKWP
>HKU1 (GenBank: AGW27881.1),
SEQ ID NO: 333
MLLIIFILPTTLAVIGDENCINFAINDKNTTVPRISEYVVDVSYGLGTYYILDRVYLNTTILFTGYFPKSGA
NERDLSLKGTTYLSTLWYQKPFLSDENNGIFSRVKNTKLYVNKTLYSEFSTIVIGSVFINNSYTIVVQPHNG
VLEITACQYTMCEYPHTICKSKGSSRNESWHEDKSEPLCLFKKNFTYNVSTDFLYFHFYQERGIFYAYYADS
GMPTTFLFSLYLGTLLSHYYVLPLICNAISSNIDNETLQYWVTPLSKRQYLLKFDNRGVITNAVDCSSSFFS
EIQCKTKSLLPNTGVYDLSGFTVKPVATVHRRIPDLPDCDIDKWLNNENVPSPLNWERKIFSNCNENLSTLL
RLVHTDSFSCNNFDESKIYGSCFKSIVLDKFAIPNSRRSDLQLGSSGFLQSSNYKIDTTSSSCQLYYSLPAI
NVTINNYNPSSWNRRYGENNENLSSHSVVYSRYCFSVNNTFCPCAKPSFASSCKSHKPPSASCPIGTNYRSC
ESTTVLDHTDWCRCSCLPDPITAYDPRSCSQKKSLVGVGEHCAGFGVDEEKCGVLDGSYNVSCLCSTDAFLG
WSYDTCVSNNRCNIFSNFILNGINSGTTCSNDLLQPNTEVYTDVCVDYDLYGITGQGIFKEVSAVYYNSWQN
LLYDSNGNIIGFKDFVINKTYNIFPCYAGRVSAAFHQNASSLALLYRNLKCSYVLNNISLATQPYFDSYLGC
VENADNLTDYSVSSCALRMGSGFCVDYNSPSFSSSGSKGSSISASYRFVTFEPFNVSFVNDSIESVGGLYEI
KIPTNFTIVGQEEFIQTNSPKVTIDCSLFVCSNYAACHDLLSEYGTFCDNINSILDEVNGLLDITQLHVADT
LMQGVTLSSNLNTNLHFDVDNINFKSLVGCLGPHCGSPSASFFEDLLEDKVKLSDVGFVEAYNNCTGGSEIR
DLLCVQSFNGIKVLPPILSESQISGYTTAATVAAMFPPWSAPAGIPFSLNVQYRINGLGVTMDVLNKNQKLI
ATAFNNALLSIQNGFSPINSALAKIQSVVNSNAQALNSLLQQLENKEGAISSSLQEILSRLDPPEAQVQIDR
LINGRLIALNAYVSQQLSDISLVKFGAALAMEKVNECVKSQSPRINFCGNGNHILSLVQNAPYGLLFMHFSY
KPISFKTVLVSPGLCISGDVGIAPKQGYFIKHNDHWMFTGSSYYYPEPISDKNVVEMNTCSVNETKAPLVYL
NHSVPKLSDFESELSHWFKNQTSIAPNLILNLHTINATELDLYYEMNLIQESIKSLNNSYINLKDIGTYEMY
VKWP

[0114] In some aspects, the recombinant SARS-CoV-1 S ectodomain included in the fusion protein comprises the “6P” mutations and an S1/S2 cleavage site mutation and an amino acid sequence at least 90% (such as at least 95%, at least 96%, at least 97%, at least 98%, or at least 99%) identical to residues 14-1188 of SEQ ID NO: 322 or 328. In some aspects, the recombinant SARS-CoV-1 S ectodomain included in the fusion protein comprises or consists of residues 14-1188 of SEQ ID NO: 322 or 328.

[0115] In some aspects, the recombinant MERS-CoV S ectodomain included in the fusion protein comprises the “6P” mutations and an S1/S2 cleavage site mutation and an amino acid sequence at least 90% (such as at least 95%, at least 96%, at least 97%, at least 98%, or at least 99%) identical to residues 18-1294 of SEQ ID NO: 323 or 329. In some aspects, the recombinant MERS-CoV S ectodomain included in the fusion protein comprises or consists of residues 18-1291 of SEQ ID NO: 323 or 329.

[0116] In some aspects, the recombinant 229E S ectodomain included in the fusion protein comprises the “5P” mutations and S1/S2 as well as S2 cleavage site mutations and an amino acid sequence at least 90% (such as at least 95%, at least 96%, at least 97%, at least 98%, or at least 99%) identical to residues 17-1112 of SEQ ID NO: 324 or 330. In some aspects, the recombinant 229E S ectodomain included in the fusion protein comprises or consists of residues 17-1112 of SEQ ID NO: 324 or 330.

[0117] In some aspects, the recombinant NL63 S ectodomain included in the fusion protein comprises the “5P” mutations and S1/S2 as well as S2 cleavage site mutations and an amino acid sequence at least 90% (such as at least 95%, at least 96%, at least 97%, at least 98%, or at least 99%) identical to residues 16-1296 of SEQ ID NO: 325 or 331. In some aspects, the recombinant NL63 S ectodomain included in the fusion protein comprises or consists of residues 16-1296 of SEQ ID NO: 325 or 331.

[0118] In some aspects, the recombinant OC43 S ectodomain included in the fusion protein comprises the “5P” mutations and S1/S2 as well as S2 cleavage site mutations and an amino acid sequence at least 90% (such as at least 95%, at least 96%, at least 97%, at least 98%, or at least 99%) identical to residues 15-1302 of SEQ ID NO: 326 or 332. In some aspects, the recombinant OC43 S ectodomain included in the fusion protein comprises or consists of residues 15-1302 of SEQ ID NO: 326 or 332.

[0119] In some aspects, the recombinant HKU1 S ectodomain included in the fusion protein comprises the “5P” mutations and S1/S2 as well as S2 cleavage site mutations and an amino acid sequence at least 90% (such as at least 95%, at least 96%, at least 97%, at least 98%, or at least 99%) identical to residues 14-1300 of SEQ ID NO: 327 or 333. In some aspects, the recombinant HKU1 S ectodomain included in the fusion protein comprises or consists of residues 14-1300 of SEQ ID NO: 327 or 333.

[0120] The recombinant SARS-CoV-1, MERS-CoV, 229E, NL63, OC43, or HKU1S ectodomain included in the fusion protein is fused to HBsAg via a peptide linker. Any suitable peptide linker may be used that allows for folding and trimerization of the SARS-CoV-1, MERS-CoV, 229E, NL63, OC43, or HKU1 S ectodomain on the surface of the HBsAg nanoparticle, for example, peptide linkers as described above for the SARS-CoV-2 S ectodomain.

[0121] Exemplary SARS-CoV-1, MERS-CoV, 229E, NL63, OC43, or HKU1 S fusion protein sequences encoded by the nucleic acid molecules are provided herein, including those listed inn Table 2:

TABLE 2
Exemplary SARS-CoV-1, MERS-CoV, 229E, NL63, OC43,
and HKU1 S ectodomain - HBsAg fusion proteins.

| SEQ ID | |
|---|---|
| NO | Sequence description |
| | S-8-HBsAg S sequences, with Spike ectodomain based on: |
| 297 | SARS-CoV-1 |
| 298 | MERS-CoV |
| 334 | 229E (Based on GenBank: ABB90529.1) |
| 335 | NL63 (Based on GenBank: APF29063.1) |
| 336 | OC43 (Based on GenBank: AIX10763.1) |
| 337 | HKU1 (Based on GenBank: AGW27881.1) |
| | S-12-HBsAg S sequences, with Spike ectodomain based on: |
| 299 | SARS-CoV-1 |
| 300 | MERS-CoV |
| 338 | 229E S5P (Based on GenBank: ABB90529.1) |
| 339 | NL63 (Based on GenBank: APF29063.1) |
| 340 | OC43 (Based on GenBank: AIX10763.1) |
| 341 | HKU1 (Based on GenBank: AGW27881.1) |
| | S-16-HBsAg S sequences, with Spike ectodomain based on: |
| 301 | SARS-CoV-1 |
| 302 | MERS-CoV |
| 342 | 229E S5P (Based on GenBank: ABB90529.1) |
| 343 | NL63 (Based on GenBank: APF29063.1) |
| 344 | OC43 (Based on GenBank: AIX10763.1) |
| 345 | HKU1 (Based on GenBank: AGW27881.1) |
| | S-8-HBsAg M sequences, with Spike ectodomain based on: |
| 303 | SARS-CoV-1 |
| 304 | MERS-CoV |
| 346 | 229E S5P (Based on GenBank: ABB90529.1) |
| 347 | NL63 (Based on GenBank: APF29063.1) |
| 348 | OC43 (Based on GenBank: AIX10763.1) |
| 349 | HKU1 (Based on GenBank: AGW27881.1) |
| | S-12-HBsAg M sequences, with Spike ectodomain based on: |
| 305 | SARS-CoV-1 |
| 306 | MERS-CoV |
| 350 | 229E S5P (Based on GenBank: ABB90529.1) |
| 351 | NL63 (Based on GenBank: APF29063.1) |
| 352 | OC43 (Based on GenBank: AIX10763.1) |
| 353 | HKU1 (Based on GenBank: AGW27881.1) |
| | S-16-HBsAg M sequences, with Spike ectodomain based on: |
| 307 | SARS-CoV-1 |
| 308 | MERS-CoV |
| 354 | 229E S5P (Based on GenBank: ABB90529.1) |
| 355 | NL63 (Based on GenBank: APF29063.1) |
| 356 | OC43 (Based on GenBank: AIX10763.1) |
| 357 | HKU1 (Based on GenBank: AGW27881.1) |
| | S-8-HBsAg L sequences, with Spike ectodomain based on: |
| 309 | SARS-CoV-1 |
| 310 | MERS-CoV |
| 358 | 229E S5P (Based on GenBank: ABB90529.1) |
| 359 | NL63 (Based on GenBank: APF29063.1) |
| 360 | OC43 (Based on GenBank: AIX10763.1) |
| 361 | HKU1 (Based on GenBank: AGW27881.1) |
| | S-12-HBsAg L sequences, with Spike ectodomain based on: |
| 311 | SARS-CoV-1 S6P |
| 312 | MERS-CoV S |
| 362 | 229E S5P (Based on GenBank: ABB90529.1) |
| 363 | NL63 (Based on GenBank: APF29063.1) |
| 364 | OC43 (Based on GenBank: AIX10763.1) |
| 365 | HKU1 (Based on GenBank: AGW27881.1) |
| | S-16-HBsAg L sequences, with Spike ectodomain based on: |
| 313 | SARS-CoV-1 |
| 314 | MERS-CoV |
| 366 | 229E S5P (Based on GenBank: ABB90529.1) |
| 367 | NL63 (Based on GenBank: APF29063.1) |
| 368 | OC43 (Based on GenBank: AIX10763.1) |
| 369 | HKU1 (Based on GenBank: AGW27881.1) |

[0122] The SARS-CoV-1 fusion protein sequences provided in Table 2 include a signal peptide (residues 1-13) that is not present in the protein as expressed in mammalian cells. In some aspects, the fusion protein encoded by the nucleic acid molecule comprises or consists of an amino acid sequence at least 90% (such as at least 95%, at least 96%, at least 97%, at least 98%, at least 99%) identical to residues 14 to the C-terminus of any one of the SARS-CoV-1-HBsAg fusion proteins provided in Table 2, such as any one of SEQ DD NOs: 297, 299, 301, 303, 305, 307, 309, 311, or 313. In some aspects, the fusion protein encoded by the nucleic acid molecule comprises or consists of the amino acid sequence set forth as residues 14 to the C-terminus of any one of the SARS-CoV-1 HBsAg fusion proteins provided in Table 2, such as any one of SEQ ID NOs: 297, 299, 301, 303, 305, 307, 309, 311, or 313.

[0123] The MERS-CoV fusion protein sequences provided in Table 2 include a signal peptide (residues 1-17) that is not present in the protein as expressed in mammalian cells. In some aspects, the fusion protein encoded by the nucleic acid molecule comprises or consists of an amino acid sequence at least 90% (such as at least 95%, at least 96%, at least 97%, at least 98%, at least 99%) identical to residues 18 to the C-terminus of any one of the MERS-CoV—HBsAg fusion proteins provided in Table 2, such as any one of SEQ ID NOs: 298, 300, 302, 304, 306, 308, 310, 312, or 314. In some aspects, the fusion protein encoded by the nucleic acid molecule comprises or consists of the amino acid sequence set forth as residues 14 to the C-terminus of any one of the SARS-CoV-1 HBsAg fusion proteins provided in Table 2, such as any one of SEQ ID NOs: 298, 300, 302, 304, 306, 308, 310, 312, or 314.

[0124] The 229E-CoV fusion protein sequences provided in Table 2 include a signal peptide (residues 1-16) that is not present in the protein as expressed in mammalian cells. In some aspects, the fusion protein encoded by the nucleic acid molecule comprises or consists of an amino acid sequence at least 90% (such as at least 95%, at least 96%, at least 97%, at least 98%, at least 99%) identical to residues 17 to the C-terminus of any one of the MERS-CoV—HBsAg fusion proteins provided in Table 2, such as any one of SEQ ID NOs: 334, 338, 342, 346, 350, 354, 358, 362, or 366. In some aspects, the fusion protein encoded by the nucleic acid molecule comprises or consists of the amino acid sequence set forth as residues 17 to the C-terminus of any one of the SARS-CoV-1 HBsAg fusion proteins provided in Table 2, such as any one of SEQ ID NOs: 334, 338, 342, 346, 350, 354, 358, 362, or 366.

[0125] The NL63-CoV fusion protein sequences provided in Table 2 include a signal peptide (residues 1-15) that is not present in the protein as expressed in mammalian cells. In some aspects, the fusion protein encoded by the nucleic acid molecule comprises or consists of an amino acid sequence at least 90% (such as at least 95%, at least 96%, at least 97%, at least 98%, at least 99%) identical to residues 16 to the C-terminus of any one of the MERS-CoV—HBsAg fusion proteins provided in Table 2, such as any one of SEQ ID NOs: 335, 339, 343, 347, 351, 355, 359, 363, or 367. In some aspects, the fusion protein encoded by the nucleic acid molecule comprises or consists of the amino acid sequence set forth as residues 16 to the C-terminus of any one of the SARS-CoV-1 HBsAg fusion proteins provided in Table 2, such as any one of SEQ ID NOs: 335, 339, 343, 347, 351, 355, 359, 363, or 367.

[0126] The OC43-CoV fusion protein sequences provided in Table 2 include a signal peptide (residues 1-14) that is not present in the protein as expressed in mammalian cells. In some aspects, the fusion protein encoded by the nucleic acid molecule comprises or consists of an amino acid sequence at least 90% (such as at least 95%, at least 96%, at least 97%, at least 98%, at least 99%) identical to residues 15 to the C-terminus of any one of the MERS-CoV-HBsAg fusion proteins provided in Table 2, such as any one of SEQ ID NOs: 336, 340, 344, 348, 352, 356, 360, 364, or 368. In some aspects, the fusion protein encoded by the nucleic acid molecule comprises or consists of the amino acid sequence set forth as residues 15 to the C-terminus of any one of the SARS-CoV-1 HBsAg fusion proteins provided in Table 2, such as any one of SEQ ID NOs: 336, 340, 344, 348, 352, 356, 360, 364, or 368.

[0127] The HKU1-CoV fusion protein sequences provided in Table 2 include a signal peptide (residues 1-13) that is not present in the protein as expressed in mammalian cells. In some aspects, the fusion protein encoded by the nucleic acid molecule comprises or consists of an amino acid sequence at least 90% (such as at least 95%, at least 96%, at least 97%, at least 98%, at least 99%) identical to residues 14 to the C-terminus of any one of the MERS-CoV-HBsAg fusion proteins provided in Table 2, such as any one of SEQ ID NOs: 337, 341, 345, 349, 353, 357, 361, 365, or 369. In some aspects, the fusion protein encoded by the nucleic acid molecule comprises or consists of the amino acid sequence set forth as residues 14 to the C-terminus of any one of the SARS-CoV-1 HBsAg fusion proteins provided in Table 2, such as any one of SEQ ID NOs: 337, 341, 345, 349, 353, 357, 361, 365, or 369.

[0128] Additional aspects of the disclosure are provided with the following clauses:

[0129] Clause 1. A nucleic acid molecule encoding a fusion protein comprising:
[0130] a recombinant Coronavirus spike(S) ectodomain comprising 817P, 892P, 899P, 942P, 986P, and 987P substitutions, or 817P, 899P, 942P, 986P, and 987P substitutions according to the reference Coronavirus S protein set forth as SEQ ID NO: 1, and fused via a peptide linker to a hepatitis B surface antigen (HBsAg) protein.

[0131] Clause 2. The nucleic acid molecule of Clause 1, wherein the fusion protein self-assembles when expressed in mammalian cells to form a HBsAg nanoparticle with Coronavirus S ectodomain trimers extending radially outward from an outer surface of the HBsAg nanoparticle.

[0132] Clause 3. The nucleic acid molecule of Clause 1 or Clause 2, wherein a S1/S2 protease cleavage site of the Coronavirus S ectodomain is mutated to inhibit protease cleavage.

[0133] Clause 4. The nucleic acid molecule of any one of the prior Clauses, wherein the Coronavirus S protein ectodomain is a SARS-CoV-1, MERS-CoV, 229E, NL63, OC43, or HKU1 S ectodomain.

[0134] Clause 5. The nucleic acid molecule of any one of the prior Clauses, wherein the Coronavirus S ectodomain comprises the 817P, 892P, 899P, 942P, 986P, and 987P substitutions, or the 817P, 899P, 942P, 986P, and 987P substitutions according to the reference Coronavirus S protein set forth as SEQ ID NO: 1;
[0135] the S1/S2 protease cleavage site of the Coronavirus S ectodomain is mutated to inhibit protease cleavage;
[0136] and the amino acid sequence of the Coronavirus S ectodomain is at least 90% identical, at least 95% identical, at least 99% identical, or identical, to:
[0137] residues 14-1188 of SEQ ID NO: 322 or 328;
[0138] residues 18-1291 of SEQ ID NO: 323 or 329;
[0139] residues 17-1112 of SEQ ID NO: 324 or 330;
[0140] residues 16-1296 of SEQ ID NO: 325 or 331;
[0141] residues 15-1302 of SEQ ID NO: 326 or 332; or
[0142] residues 14-1300 of SEQ ID NO: 327 or 333.

[0143] Clause 6. The nucleic acid molecule of any one of the prior Clauses, wherein the peptide linker is from 12-39 amino acid residues in length.

[0144] Clause 7. The nucleic acid molecule of Clause 6, wherein the peptide linker is from 12-32 residues in length.

[0145] Clause 8. The nucleic acid molecule of Clause 6, wherein the peptide linker is 24 or 32 residues in length.

[0146] Clause 9. The nucleic acid molecule of any one of the prior Clauses, wherein the peptide linker is a glycine-serine linker.

[0147] Clause 10. The nucleic acid molecule of Clause 9, wherein the glycine-serine peptide linker is a repeat of glycine-serine dipeptides.

[0148] Clause 11. The nucleic acid molecule of any one of the prior Clauses, wherein the sequence of the peptide linker is set forth as any one of SEQ ID NOs: 4-7.

[0149] Clause 12. The nucleic acid molecule of any one of the prior Clauses, wherein the HBsAg protein comprises or consists of a HBsAg S protein, a HBsAg M protein, or a HBsAg L protein.

[0150] Clause 13. The nucleic acid molecule of Clause 12, wherein the HBsAg protein comprises or consists of the HBsAg S protein.

[0151] Clause 14. The nucleic acid molecule of Clauses 12 or 13, wherein the HBsAg protein comprises or consists of an amino acid sequence at least 90% identical, at least 95% identical, at least 99% identical, or identical, to any one of SEQ ID NOs: 9 or 45-56.

[0152] Clause 15. The nucleic acid molecule of Clause 15 or Clause 16, wherein the HBsAg protein comprises or consists of an amino acid sequence at least 90% identical, at least 95% identical, at least 99% identical, or identical, to SEQ ID NO: 9.

[0153] Clause 16. The nucleic acid molecule of any one of the prior Clauses, wherein the fusion protein comprises or consists of an amino acid sequence at least 90% identical, at least 95% identical, at least 99% identical, or identical, to
[0154] residues 14 to the C-terminus of any one SEQ ID NOs: 297, 299, 301, 303, 305, 307, 309, 311, or 313;
[0155] residues 14 to the C-terminus of any one of SEQ ID NOs: 298, 300, 302, 304, 306, 308, 310, 312, or 314;
[0156] residues 17 to the C-terminus of any one of SEQ ID NOs: 334, 338, 342, 346, 350, 354, 358, 362, or 366;
[0157] residues 16 to the C-terminus of any one of SEQ ID NOs: 335, 339, 343, 347, 351, 355, 359, 363, or 367;
[0158] residues 15 to the C-terminus of any one of SEQ ID NOs: 336, 340, 344, 348, 352, 356, 360, 364, or 368; or
[0159] residues 14 to the C-terminus of any one of SEQ ID NOs: 337, 341, 345, 349, 353, 357, 361, 365, or 369.

[0160] Clause 17. The nucleic acid molecule of any one of the prior Clauses, wherein the nucleic acid molecule is DNA or RNA.

[0161] Clause 18. The nucleic acid molecule of any one of the prior Clauses, wherein the nucleic acid molecule is an mRNA or circular RNA.

[0162] Clause 19. A vector comprising the nucleic acid molecule of any one of the prior Clauses.

[0163] Clause 20. The vector of Clause 19, wherein the vector is a DNA vector, an RNA vector, or a viral vector.

[0164] Clause 21. A HBsAg protein nanoparticle encoded by the nucleic acid or vector of any one of the prior Clauses.

[0165] Clause 22. The HBsAg protein nanoparticle of Clause 21, comprising Coronavirus S ectodomain trimers extending radially outward from an outer surface of the nanoparticle.

[0166] Clause 23. An immunogenic composition comprising the nucleic acid molecule, vector, or HBsAg protein nanoparticle of any one of the prior Clauses and a pharmaceutically acceptable carrier.

[0167] Clause 24. The composition of Clause 23, wherein the nucleic acid molecule is an mRNA or circular RNA and the composition further comprises a lipid nanoparticle.

[0168] Clause 25. A method, comprising administering to a subject an amount of the nucleic acid molecule, the vector, HBsAg protein nanoparticle, or the composition of any one of the prior Clauses in an amount effective to elicit a neutralizing immune response to Coronavirus in the subject.

[0169] Clause 26. The method of Clause 25, wherein the subject was previously exposed to HBsAg by hepatitis B infection or vaccination.

[0170] Clause 27. The method of Clause 25 or Clause 26, wherein the immune response inhibits or prevents infection by the Coronavirus in the subject.

[0171] Clause 28. The method of any one of Clauses 25-27, wherein the immune response inhibits or prevents severe disease due to the Coronavirus in the subject.

### C. Additional Description

[0172] Analogs and variants of the recombinant Coronavirus S ectodomain (e.g., SARS-CoV-2, SARS-CoV-1, MERS-CoV, 229E, NL63, OC43, or HKU1 S ectodomain), peptide linker, or HBsAg included in the disclosed fusion protein may be used in the methods and systems of the present disclosure, as long as the resulting fusion protein self-assembles to form a HBsAg nanoparticle with Coronavirus S ectodomain (e.g., SARS-CoV-2, SARS-CoV-1, MERS-CoV, 229E, NL63, OC43, or HKU1 S ectodomain) trimers extending radially outward from an outer surface of the HBsAg nanoparticle, and wherein the Coronavirus S ectodomain (e.g., SARS-CoV-2, SARS-CoV-1, MERS-CoV, 229E, NL63, OC43, or HKU1 S ectodomain) trimer maintains binding to cell surface receptor. Through the use of recombinant nucleic acid technology, variants of the recombinant Coronavirus S ectodomain (e.g., SARS-CoV-2, SARS-CoV-1, MERS-CoV, 229E, NL63, OC43, or HKU1 S ectodomain), peptide linker, or HBsAg included in the disclosed fusion protein may be prepared by altering the encoding nucleic acid sequence. Non-limiting examples of such variants include insertions, substitutions, or deletions of one or more amino acid residues to further stabilize the prefusion conformation of the S ectodomain, to add mutations from variant Coronavirus strains, or to add or remove glycan sequon.

[0173] The nucleic acid molecule encoding the fusion protein can be any suitable type of nucleic acid molecule including DNA (such as cDNA) and RNA (such as mRNA, circular RNA), as well as modified forms thereof (such as but are not limited to modified mRNA with N1-methylpseudouridine in place of uridine), that encode the fusion protein, as well as vectors including the DNA, cDNA and RNA sequences, such as a DNA or RNA vector used for immunization. The genetic code may be used to construct a variety of functionally equivalent nucleic acids, such as nucleic acids which differ in sequence but which encode the same fusion protein sequence.

[0174] Exemplary nucleic acids can be prepared by cloning techniques. Examples of appropriate cloning and sequencing techniques, and instructions sufficient to direct persons of skill through many cloning exercises are known (see, e.g., Sambrook et al. (Molecular Cloning: A Laboratory Manual, 4^{th} ed, Cold Spring Harbor, New York, 2012) and Ausubel et al. (In Current Protocols in Molecular Biology, John Wiley & Sons, New York, through supplement 104, 2013).

[0175] Nucleic acids can also be prepared by amplification methods. Amplification methods include polymerase chain reaction (PCR), the ligase chain reaction (LCR), the transcription-based amplification system (TAS), the self-sustained sequence replication system (3SR). A wide variety of cloning methods, host cells, and in vitro amplification methodologies are well known to persons of skill.

[0176] The polynucleotides can include a recombinant DNA which is incorporated into a vector (such as an expression vector) into an autonomously replicating plasmid or virus or into the genomic DNA of a prokaryote or eukaryote, or which exists as a separate molecule (such as a cDNA) independent of other sequences. The nucleotides can be ribonucleotides, deoxyribonucleotides, or modified forms of either nucleotide. The term includes single and double forms of DNA.

[0177] Polynucleotide sequences can be operatively linked to expression control sequences. An expression control sequence operatively linked to a coding sequence is ligated such that expression of the coding sequence is achieved under conditions compatible with the expression control sequences. The expression control sequences include, but are not limited to, appropriate promoters, enhancers, transcription terminators, a start codon (i.e., ATG) in front of a protein-encoding gene, splicing signal for introns, maintenance of the correct reading frame of that gene to permit proper translation of mRNA, and stop codons.

[0178] Nucleic acid molecules encoding the disclosed fusion proteins can be expressed in vitro by transfer into a suitable host cell. The cell may be prokaryotic or eukaryotic. The term also includes any progeny of the subject host cell. It is understood that all progenies may not be identical to the parental cell since there may be mutations that occur during replication. Methods of stable transfer, meaning that the foreign DNA is continuously maintained in the host, are known in the art.

### IV. Immunogenic Compositions

[0179] Immunogenic compositions comprising a disclosed nucleic acid molecule encoding a Coronavirus S ectodomain-HBsAg fusion protein (such as a SARS-CoV-2 S ectodomain-HBsAg fusion protein), or a HBsAg nanoparticle displaying the Coronavirus S ectodomain (such as SARS-CoV-2 S ectodomain) encoded by the nucleic acid molecule, and a pharmaceutically acceptable carrier are also provided. Such compositions can be administered to subjects by any suitable method, for example, intramuscular, intradermal, subcutaneous, intravenous, intra-arterial, intra-articular, intraperitoneal, intranasal, sublingual, tonsillar, oropharyngeal, or other parenteral and mucosal routes.

[0180] Thus, a nucleic acid molecule encoding a Coronavirus S ectodomain-HBsAg fusion protein (such as a SARS-CoV-2 S ectodomain-HBsAg fusion protein), or a HBsAg nanoparticle displaying the Coronavirus S ectodomain (such as SARS-CoV-2 S ectodomain) encoded by the nucleic acid molecule, as described herein can be formulated with pharmaceutically acceptable carriers to help retain biological activity while also promoting increased stability during storage within an acceptable temperature range. Potential carriers include, but are not limited to, physiologically balanced culture medium, phosphate buffer saline solution, water, emulsions (e.g., oil/water or water/oil emulsions), various types of wetting agents, cryoprotective additives or stabilizers such as proteins, peptides or hydrolysates (e.g., albumin, gelatin), sugars (e.g., sucrose, lactose, sorbitol), amino acids (e.g., sodium glutamate), or other protective agents. The resulting aqueous solutions may be packaged for use as is or lyophilized. Lyophilized preparations are combined with a sterile solution prior to administration for either single or multiple dosing.

[0181] Formulated compositions, especially liquid formulations, may contain a bacteriostat to prevent or minimize degradation during storage, including but not limited to effective concentrations (usually ≤1% w/v) of benzyl alcohol, phenol, m-cresol, chlorobutanol, methylparaben, and/or propylparaben. A bacteriostat may be contraindicated for some patients; therefore, a lyophilized formulation may be reconstituted in a solution either containing or not containing such a component.

[0182] The immunogenic compositions of the disclosure can contain as pharmaceutically acceptable vehicles substances as required to approximate physiological conditions, such as pH adjusting and buffering agents, tonicity adjusting agents, wetting agents and the like, for example, sodium acetate, sodium lactate, sodium chloride, potassium chloride, calcium chloride, sorbitan monolaurate, and triethanolamine oleate.

[0183] The immunogenic composition may optionally include an adjuvant to enhance an immune response of the host. Suitable adjuvants are, for example, toll-like receptor agonists, alum, AlPO4, alhydrogel, Lipid-A and derivatives or variants thereof, oil-emulsions, saponins, neutral liposomes, liposomes containing the vaccine and cytokines, non-ionic block copolymers, and chemokines. Non-ionic block polymers containing polyoxyethylene (POE) and polyxylpropylene (POP), such as POE-POP-POE block copolymers, MPL™ (3-O-deacylated monophosphoryl lipid A; Corixa, Hamilton, IN) and IL-12 (Genetics Institute, Cambridge, MA), among many other suitable adjuvants well known in the art, may be used as an adjuvant (Newman et al., 1998, Critical Reviews in Therapeutic Drug Carrier Systems 15:89-142). These adjuvants have the advantage in that they help to stimulate the immune system in a non-specific way, thus enhancing the immune response to a pharmaceutical product.

[0184] In some instances it may be desirable to combine a disclosed immunogen with other pharmaceutical products (e.g., vaccines) which induce protective responses to other agents. For example, a composition including a nucleic acid molecule encoding a Coronavirus S ectodomain-HBsAg fusion protein (such as a SARS-CoV-2 S ectodomain-HBsAg fusion protein), or a HBsAg nanoparticle displaying the Coronavirus S ectodomain (such as SARS-CoV-2 S ectodomain) by the nucleic acid molecule, as described herein can be can be administered simultaneously (typically separately) or sequentially with other vaccines recommended by the Advisory Committee on Immunization Practices (ACIP; cdc.gov/vaccines/acip/index.html) for the targeted age group (e.g., infants from approximately one to six months of age), such as an influenza vaccine or a varicella zoster vaccine. As such, a disclosed immunogen including a nucleic acid molecule encoding a SARS-CoV-2 S ectodomain-HBsAg fusion protein described herein may be administered simultaneously or sequentially with vaccines against, for example, hepatitis B (HepB), diphtheria, tetanus and pertussis (DTaP), pneumococcal bacteria (PCV), Haemophilus influenzae type b (Hib), polio, influenza and rotavirus.

[0185] In some aspects, the composition can be provided as a sterile composition. Typically, the amount of immunogen in each dose of the immunogenic composition is selected as an amount which induces an immune response without significant, adverse side effects. In some aspects, the composition can be provided in unit dosage form for use to induce an immune response in a subject. A unit dosage form contains a suitable single preselected dosage for administration to a subject, or suitable marked or measured multiples of two or more preselected unit dosages, and/or a metering mechanism for administering the unit dose or multiples thereof. In other aspects, the composition further includes an adjuvant.

[0186] The immunogenic compositions provided herein can be formulated for mucosal vaccination, such as intranasal administration. Mucosal vaccination can be achieved by a number of routes including oral, intranasal, pulmonary, rectal and vaginal. In a specific example, this is achieved by intranasal administration. Thus, in some examples the disclosed compositions are formulated for intranasal administration.

[0187] For example, the disclosed compositions can include one or more biodegradable, mucoadhesive polymeric carriers. Polymers such as polylactide-co-glycolide (PLGA), chitosan, alginate and carbopol can be included. Hydrophilic polymers, like sodium alginate and carbopol, absorb to the mucus by forming hydrogen bonds, consequently enhancing nasal residence time, and thus can be included in the disclosed compositions.

[0188] In one example, the composition includes sodium alginate, which is a linear copolymer and consists of 1-4-linked β-d-mannuronic acid and 1-4-linked α-1-guluronic acid residues. In some examples, the composition includes alginate microspheres. In one example, the composition includes carbopol (a cross-linked polyacrylic acid polymer), for example in combination with starch. In some examples, the composition includes chitosan, a non-toxic linear polysaccharide that can be produced by chitin deacetylation. In one example the chitosan is in the form of chitosan nanoparticles, such as N-trimethyl chitosan (TMC)-based nanoparticles.

[0189] In one example, the composition is formulated as a particulate delivery system used for nasal administration. In one example the composition can include liposomes, immune-stimulating complexes (ISCOMs) and/or polymeric particles, such as virosomes. In one example, the liposome is surface-modified (e.g., glycol chitosan or oligomannose coated). In one example, the liposome is fusogenic or cationic-fusogenic.

[0190] The compositions can also include one or more lipopeptides of bacterial origin, or their synthetic derivatives. Examples of lipid moieties include tri-palmitoyl-S-glyceryl cysteine (Pam3Cys), di-palmitoyl-S-glyceryl cysteine (Pam2Cys), single/multiple-chain palmitic acids and lipoamino acids (LAAs).

[0191] The compositions can also include one or more adjuvants, for example a mucosal adjuvant, such as one or more of CpG oligodeoxynucleotides (CpG ODN), Flt3 ligand, and monophosphoryl lipid A (MLA). In one example, the adjuvant includes a clinical grade MLA formulation, such as MPL® (3-O-desacyl-4′-monophosphoryl lipid A) adjuvant.

### V. Methods of Eliciting an Immune Response

[0192] The disclosed nucleic acid molecule encoding a Coronavirus S ectodomain-HBsAg fusion protein (such as a SARS-CoV-2 S ectodomain-HBsAg fusion protein), or a HBsAg nanoparticle displaying the Coronavirus S ectodomain (such as SARS-CoV-2 S ectodomain) encoded by the nucleic acid molecule, can be administered to a subject to induce an immune response to the Coronavirus S protein in the subject. In a particular example, the subject is a human. Following administration of the nucleic acid molecule, the Coronavirus S ectodomain-HBsAg fusion protein (such as a SARS-CoV-2 S ectodomain-HBsAg fusion protein) is produced within cells of the subject, and self-assembles to form HBsAg nanoparticles with Coronavirus S ectodomain (such as SARS-CoV-2 S ectodomain) trimers extending radially outward from the outer surface of the HBsAg nanoparticle. The HBsAg nanoparticle displaying the Coronavirus S ectodomain trimers (such as SARS-CoV-2 S ectodomain trimers), whether administered as protein or encoding nucleic acid molecule, elicits the desired immune response to the Coronavirus S ectodomain (such as a SARS-CoV-2 S ectodomain) in the subject. The immune response can be a protective immune response, for example a response that inhibits subsequent infection with the Coronavirus (such as SARS-CoV-2). Elicitation of the immune response can also be used to treat or inhibit Coronavirus infection (such as SARS-CoV-2 infection) and illnesses associated with the infection.

[0193] A subject can be selected for treatment that has or is at risk for developing a Coronavirus (such as SARS-CoV-2) infection, for example because of exposure or the possibility of exposure to the Coronavirus. Following administration of a disclosed immunogen, the subject can be monitored for infection or symptoms associated with Coronavirus infection.

[0194] Typical subjects intended for vaccination with the nucleic acid molecule encoding a Coronavirus S ectodomain—HBsAg fusion protein (such as a SARS-CoV-2 S ectodomain-HBsAg fusion protein), or a HBsAg nanoparticle displaying the Coronavirus S ectodomain (such as SARS-CoV-2 S ectodomain) encoded by the nucleic acid molecule, of the present disclosure include humans, as well as non-human primates and other animals. To identify subjects for prophylaxis or treatment according to the methods of the disclosure, accepted screening methods are employed to determine risk factors associated with a targeted or suspected disease or condition, or to determine the status of an existing disease or condition in a subject. These screening methods include, for example, conventional work-ups to determine environmental, familial, occupational, and other such risk factors that may be associated with the targeted or suspected disease or condition, as well as diagnostic methods, such as various ELISA and other immunoassay methods to detect and/or characterize coronavirus infection. These and other routine methods allow the clinician to select patients in need of therapy using the methods and pharmaceutical compositions of the disclosure. In accordance with these methods and principles, a composition can be administered according to the teachings herein, or other conventional methods, as an independent prophylaxis or treatment program, or as a follow-up, adjunct or coordinate treatment regimen to other treatments.

[0195] The administration of a disclosed nucleic acid molecule encoding a Coronavirus S ectodomain-HBsAg fusion protein (such as a SARS-CoV-2 S ectodomain-HBsAg fusion protein), or a HBsAg nanoparticle displaying the Coronavirus S ectodomain (such as SARS-CoV-2 S ectodomain) encoded by the nucleic acid molecule, can be for prophylactic or therapeutic purpose. When provided prophylactically, the immunogen is provided in advance of infection. The prophylactic administration serves to prevent or ameliorate any subsequent infection. When provided therapeutically, the immunogen is provided at or after the onset of a symptom of infection, for example, after development of a symptom of SARS-CoV-2 infection or after diagnosis with the SARS-CoV-2 infection. The nucleic acid molecule encoding a Coronavirus S ectodomain—HBsAg fusion protein (such as a SARS-CoV-2 S ectodomain—HBsAg fusion protein), or a HBsAg nanoparticle displaying the Coronavirus S ectodomain (such as SARS-CoV-2 S ectodomain) encoded by the nucleic acid molecule, can thus be provided prior to the anticipated exposure to the Coronavirus so as to attenuate the anticipated severity, duration or extent of an infection and/or associated disease symptoms, after exposure or suspected exposure to the Coronavirus, or after the actual initiation of an infection.

[0196] The nucleic acid molecule encoding a Coronavirus S ectodomain—HBsAg fusion protein (such as a SARS-CoV-2 S ectodomain—HBsAg fusion protein), or a HBsAg nanoparticle displaying the Coronavirus S ectodomain (such as SARS-CoV-2 S ectodomain) encoded by the nucleic acid molecule, and compositions thereof, are provided to a subject in an amount effective to induce or enhance an immune response against the Coronavirus S protein in the subject, preferably a human. The actual dosage of disclosed immunogen may vary according to factors such as the disease indication and particular status of the subject (for example, the subject's age, size, fitness, extent of symptoms, susceptibility factors, and the like), time and route of administration, other drugs or treatments being administered concurrently, as well as the specific pharmacology of the composition for eliciting the desired activity or biological response in the subject. Dosage regimens can be adjusted to provide an optimum prophylactic or therapeutic response.

[0197] A composition including the nucleic acid molecule encoding a Coronavirus S ectodomain—HBsAg fusion protein (such as a SARS-CoV-2 S ectodomain—HBsAg fusion protein), or a HBsAg nanoparticle displaying the Coronavirus S ectodomain (such as SARS-CoV-2 S ectodomain) encoded by the nucleic acid molecule, can be used in coordinate (or prime-boost) vaccination protocols or combinatorial formulations. There can be several boosts. In some examples the boost may be the same nucleic acid molecule encoding a SARS-CoV-2 S ectodomain—HBsAg fusion protein or HBsAg nanoparticle displaying the SARS-CoV-2 ectodomain encoded by the nucleic acid molecule as another boost, or the prime. The prime and boost can be administered as a single dose or multiple doses, for example two doses, three doses, four doses, five doses, six doses or more can be administered to a subject over days, weeks or months. Multiple boosts can also be given, such one to five (e.g., 1, 2, 3, 4 or 5 boosts), or more. Different dosages can be used in a series of sequential immunizations. For example a relatively large dose in a primary immunization and then a boost with relatively smaller doses.

[0198] In some aspects, the boost can be administered about two, about three to eight, or about four, weeks following the prime, or about several months after the prime. In some aspects, the boost can be administered about 5, about 6, about 7, about 8, about 10, about 12, about 18, about 24, months after the prime, or more or less time after the prime. Periodic additional boosts can also be used at appropriate time points to enhance the subject's “immune memory.” The adequacy of the vaccination parameters chosen, e.g., formulation, dose, regimen and the like, can be determined by taking aliquots of serum from the subject and assaying antibody titers during the course of the immunization program. In addition, the clinical condition of the subject can be monitored for the desired effect, e.g., prevention of infection or improvement in disease state (e.g., reduction in viral load). If such monitoring indicates that vaccination is sub-optimal, the subject can be boosted with an additional dose of immunogenic composition, and the vaccination parameters can be modified in a fashion expected to potentiate the immune response.

[0199] The amount of nucleic acid molecule encoding a Coronavirus S ectodomain—HBsAg fusion protein (such as a SARS-CoV-2 S ectodomain—HBsAg fusion protein), or a HBsAg nanoparticle displaying the Coronavirus S ectodomain (such as SARS-CoV-2 S ectodomain) encoded by the nucleic acid molecule, utilized in an immunogenic composition may be selected based on the subject population (e.g., infant or elderly). An optimal amount for a particular composition can be ascertained by standard studies involving observation of antibody titers and other responses in subjects. It is understood that an effective amount of a disclosed nucleic acid molecule encoding a Coronavirus S ectodomain—HBsAg fusion protein (such as a SARS-CoV-2 S ectodomain—HBsAg fusion protein), or a HBsAg nanoparticle displaying the Coronavirus S ectodomain (such as SARS-CoV-2 S ectodomain) encoded by the nucleic acid molecule, can include an amount that is ineffective at eliciting an immune response by administration of a single dose, but that is effective upon administration of multiple dosages, for example in a prime-boost administration protocol.

[0200] In some aspects, the antibody response of a subject will be determined in the context of evaluating effective dosages/immunization protocols. In most instances it will be sufficient to assess the antibody titer in serum or plasma obtained from the subject. Decisions as to whether to administer booster inoculations and/or to change the amount of the nucleic acid molecule encoding a Coronavirus S ectodomain—HBsAg fusion protein (such as a SARS-CoV-2 S ectodomain—HBsAg fusion protein), or a HBsAg nanoparticle displaying the Coronavirus S ectodomain (such as SARS-CoV-2 S ectodomain) encoded by the nucleic acid molecule, administered to the individual can be at least partially based on the antibody titer level. The antibody titer level can be based on, for example, an immunobinding assay which measures the concentration of antibodies in the serum which bind to an antigen including, for example, the recombinant SARS-CoV-2 S ectodomain included in the fusion protein.

[0201] The Coronavirus infection does not need to be completely eliminated or reduced or prevented for the methods to be effective. For example, elicitation of an immune response to Coronavirus with one or more of the disclosed nucleic acid molecule encoding a Coronavirus S ectodomain—HBsAg fusion protein, or a HBsAg nanoparticle displaying the Coronavirus ectodomain encoded by the nucleic acid molecule, can reduce or inhibit infection with the Coronavirus by a desired amount, for example, by at least 10%, at least 20%, at least 50%, at least 60%, at least 70%, at least 80%, at least 90%, at least 95%, at least 98%, or even at least 100% (elimination or prevention of detectable infected cells), as compared to infection in the absence of the immunogen. In additional examples, replication of the Coronavirus can be reduced or inhibited by the disclosed methods. Replication does not need to be completely eliminated for the method to be effective. For example, the immune response elicited using one or more of the disclosed immunogens can reduce replication of the Coronavirus by a desired amount, for example, by at least 10%, at least 20%, at least 50%, at least 60%, at least 70%, at least 80%, at least 90%, at least 95%, at least 98%, or even at least 100% (elimination or prevention of detectable replication), as compared to replication in the absence of the immunogen.

[0202] SARS-CoV-2 infection does not need to be completely eliminated or reduced or prevented for the methods to be effective. For example, elicitation of an immune response to SARS-CoV-2 with one or more of the disclosed nucleic acid molecule encoding a SARS-CoV-2 S ectodomain—HBsAg fusion protein, or a HBsAg nanoparticle displaying the SARS-CoV-2 ectodomain encoded by the nucleic acid molecule, can reduce or inhibit SARS-CoV-2 infection by a desired amount, for example, by at least 10%, at least 20%, at least 50%, at least 60%, at least 70%, at least 80%, at least 90%, at least 95%, at least 98%, or even at least 100% (elimination or prevention of detectable infected cells), as compared to SARS-CoV-2 infection in the absence of the immunogen. In additional examples, SARS-CoV-2 replication can be reduced or inhibited by the disclosed methods. SARS-CoV-2 replication does not need to be completely eliminated for the method to be effective. For example, the immune response elicited using one or more of the disclosed immunogens can reduce SARS-CoV-2 replication by a desired amount, for example, by at least 10%, at least 20%, at least 50%, at least 60%, at least 70%, at least 80%, at least 90%, at least 95%, at least 98%, or even at least 100% (elimination or prevention of detectable SARS-CoV-2 replication), as compared to SARS-CoV-2 replication in the absence of the immunogen.

[0203] In some aspects, the disclosed nucleic acid molecule encoding a Coronavirus S ectodomain-HBsAg fusion protein (such as a SARS-CoV-2 S ectodomain—HBsAg fusion protein), or a HBsAg nanoparticle displaying the Coronavirus S ectodomain (such as SARS-CoV-2 S ectodomain) encoded by the nucleic acid molecule, is administered to the subject simultaneously with the administration of the adjuvant. In other aspects, the disclosed immunogen is administered to the subject after the administration of the adjuvant and within a sufficient amount of time to induce the immune response.

[0204] One approach to administration of nucleic acids is direct immunization with plasmid DNA, such as with a mammalian expression plasmid. Immunization by nucleic acid constructs is well known in the art and taught, for example, in U.S. Pat. No. 5,643,578 (which describes methods of immunizing vertebrates by introducing DNA encoding a desired antigen to elicit a cell-mediated or a humoral response), and U.S. Pat. Nos. 5,593,972 and 5,817,637 (which describe operably linking a nucleic acid sequence encoding an antigen to regulatory sequences enabling expression). U.S. Pat. No. 5,880,103 describes several methods of delivery of nucleic acids encoding immunogenic peptides or other antigens to an organism. The methods include liposomal delivery of the nucleic acids (or of the synthetic peptides themselves), and immune-stimulating constructs, or ISCOMS™, negatively charged cage-like structures of 30-40 nm in size formed spontaneously on mixing cholesterol and Quil ATM (saponin). Protective immunity has been generated in a variety of experimental models of infection, including toxoplasmosis and Epstein-Barr virus-induced tumors, using ISCOMS™ as the delivery vehicle for antigens (Mowat and Donachie, Immunol. Today 12:383, 1991). Doses of antigen as low as 1 μg encapsulated in ISCOMS™ have been found to produce Class I mediated CTL responses (Takahashi et al., Nature 344:873, 1990).

[0205] In some aspects, a plasmid DNA vaccine is used to express a disclosed immunogen in a subject. For example, a nucleic acid molecule encoding a disclosed immunogen can be administered to a subject to induce an immune response to the Coronavirus S protein (such as SARS-CoV-2 S protein) included in the immunogen. In some aspects, the nucleic acid molecule can be included on a plasmid vector for DNA immunization, such as the pVRC8400 vector (described in Barouch et al., J. Virol, 79, 8828-8834, 2005, which is incorporated by reference herein). Additional non-limiting vector examples include CMVR8400 or pVRC8400, CMV8X, pcDNA™3.1 (+) 3.2, 4, 5, 6.2 series of vectors, pCAGGS, pCAGGS-G-Kan, pBOOST (InvivoGen), and pVAC (InvivoGen).

[0206] In another approach to using nucleic acids for immunization, the nucleic acid molecule can be expressed by attenuated viral hosts or vectors or bacterial vectors. Recombinant vaccinia virus, adeno-associated virus (AAV), herpes virus, retrovirus, cytomegalo virus or other viral vectors can be used to express the peptide or protein, thereby eliciting a CTL response. For example, vaccinia vectors and methods useful in immunization protocols are described in U.S. Pat. No. 4,722,848. BCG (Bacillus Calmette Guerin) provides another vector for expression of the peptides (see Stover, Nature 351:456-460, 1991).

[0207] In one aspect, a nucleic acid molecule may be introduced directly into cells. For example, the nucleic acid can be loaded onto gold microspheres by standard methods and introduced into the skin by a device such as Bio-Rad's HELIOS™ Gene Gun. The nucleic acids can be “naked,” consisting of plasmids under control of a strong promoter. Typically, the DNA is injected into muscle, although it can also be injected directly into other sites. Dosages for injection are usually around 0.5 μg/kg to about 50 mg/kg, and typically are about 0.005 mg/kg to about 5 mg/kg (see, e.g., U.S. Pat. No. 5,589,466).

[0208] In another aspect, an mRNA-based immunization protocol can be used to deliver a nucleic acid encoding the Coronavirus S ectodomain—HBsAg fusion protein (such as a SARS-CoV-2 S ectodomain-HBsAg fusion protein) to elicit an immune response to the Coronavirus. mRNA vaccines preclude safety concerns about DNA integration into the host genome and can be directly translated in the host cell cytoplasm. Moreover, cell-free, in vitro synthesis of RNA avoids the manufacturing complications associated with viral vectors.

[0209] In some aspects, mRNA vaccination is achieved using mRNA encoding a Coronavirus S ectodomain—HBsAg fusion protein as described herein and formulated as a lipid nanoparticle according to known methods, such as those described in WO2021154763, US20210228707, WO2017070626 and US2019/0192646, which are incorporated by reference herein. See, also, Jackson et al., N Engl J Med., 383 (20): 1920-1921, 2020, incorporated by reference herein. For example the mRNA component is a modified mRNA with 1-methylpseudouridine in place of uridine and a 7 mG (5′) ppp (5′) N1mpNp cap. The mRNA sequence includes a 5′ untranslated region (UTR), the immunogen (Coronavirus S ectodomain—HBsAg fusion protein open reading frame), a 3′ UTR, and a polyA tail. In some aspects, the ORF sequence is codon optimized relative to native sequence for mRNA expression in a human and to increase stability. In several aspects, the mRNA is formulated in a lipid nanoparticle; for example, comprising a PEG-modified lipid, a non-cationic lipid, a sterol, an ionizable lipid, or any combination thereof. In some aspects, the lipid nanoparticle is composed of 50 mol % ionizable lipid ((2 hydroxyethyl) (6 oxo 6-(undecycloxy) hexyl)amino) octanoate, 10 mol % 1,2 distearoyl sn glycerol-3 phosphocholine (DSPC), 38.5 mol % cholesterol, and 1.5 mol % 1-monomethoxypolyethyleneglycol-2,3, dimyristylglycerol with polyethylene glycol of average molecular weight 2000 (PEG2000 DMG). The mRNA/lipid nanoparticle composition may be provided in any suitable carrier, such as a sterile liquid for injection at a concentration of 0.5 mg/mL in 20 mM trometamol (Tris) buffer containing 87 mg/mL sucrose and 10.7 mM sodium acetate, at pH 7.5 and with appropriate diluent.

[0210] Additional exemplary forms of RNA-based vaccination that can be used to deliver a nucleic acid encoding a Coronavirus S ectodomain—HBsAg fusion protein as described herein include conventional non-amplifying mRNA immunization (see, e.g., Petsch et al., “Protective efficacy of in vitro synthesized, specific mRNA vaccines against influenza A virus infection,” Nature biotechnology, 30 (12): 1210-6, 2012) and self-amplifying mRNA immunization (see, e.g., Geall et al., “Nonviral delivery of self-amplifying RNA vaccines,” PNAS, 109 (36): 14604-14609, 2012; Magini et al., “Self-Amplifying mRNA Vaccines Expressing Multiple Conserved Influenza Antigens Confer Protection against Homologous and Heterosubtypic Viral Challenge,” PLOS One, 11 (8): e0161193, 2016; and Brito et al., “Self-amplifying mRNA vaccines,” Adv Genet., 89:179-233, 2015). In another aspect, a circular RNA (circRNA)-based immunization protocol can be used to deliver a nucleic acid encoding the Coronavirus S ectodomain-HBsAg fusion protein (such as a SARS-CoV-2 S ectodomain—HBsAg fusion protein) to elicit an immune response to the Coronavirus. In contrast to linear RNA, circRNA is stable due to its covalently closed ring structure, which protects it from exonuclease-mediated degradation. Although circRNA lacks the essential elements for cap-dependent translation, it can be engineered to enable protein translation through internal ribosome entry site (IRES) or the m6A modification incorporated to its 5′ UTR region. (See, e.g., Wesselhoeft, P. S. Kowalski, D. G. Anderson, Engineering circular RNA for potent and stable translation in eukaryotic cells. Nat Commun. 9, 2629, 2018; Yang et al., Extensive translation of circular RNAs driven by N(6)-methyladenosine. Cell Res. 27, 626-641, 2017; Kristensen et al. The biogenesis, biology, and characterization or circular RNAs. Nat. Rev. Genetics, 20, 675-691, 2029).

[0211] In some aspects, administration of a therapeutically effective amount of one or more of the disclosed immunogens to a subject induces a neutralizing antibody response in the subject. To assess neutralization activity, following immunization of a subject, serum can be collected from the subject at appropriate time points, frozen, and stored for neutralization testing. Methods to assay for neutralization activity include, but are not limited to, plaque reduction neutralization (PRNT) assays, microneutralization assays, flow cytometry based assays, single-cycle infection assays. In some aspects, the serum neutralization activity can be assayed using a SARS-CoV-2 pseudovirus, for example, as described in Corbett et al., Nature 586, 567-571, 2020, which is incorporated by reference herein in its entirety.

### EXAMPLES

[0212] The following examples are provided to illustrate certain particular features and/or aspects. These examples should not be construed to limit the disclosure to the particular features or aspects described.

### Example 1

### Self-Assembling SARS-CoV-2 Spike—HBsAg Nanoparticles Elicit Potent and Durable Neutralizing Antibody Responses via Genetic Delivery

[0213] While several COVID-19 vaccines have been in use, more effective and durable vaccines are needed to combat the ongoing COVID-19 pandemic. In this example, we report highly immunogenic self-assembling SARS-CoV-2 spike-HBsAg nanoparticles displaying a six-proline-stabilized WA1 spike S6P on a HBsAg core. These S6P—HBsAgs bound diverse domain-specific SARS-CoV-2 monoclonal antibodies. In mice with and without a HBV pre-vaccination, nucleic acid immunization with S6P—HBsAgs elicited significantly more potent and durable neutralizing antibody (nAb) responses against diverse SARS-CoV-2 strains than that of soluble S2P or S6P, or full-length S2P with its coding sequence matching mRNA-1273. The nAb responses elicited by S6P—HBsAgs can persist 7 months longer than by soluble S2P or S6P and appeared to be enhanced by HBsAg pre-exposure. These data show that genetic delivery of SARS-CoV-2 S6P—HBsAg nanoparticles can elicit greater and more durable nAb responses than non-nanoparticle forms of stabilized spike.

### RESULTS

### SARS-CoV-2 S6P—HBsAg Constructs can Express Self-Assembling Nanoparticles

[0214] We designed plasmid DNAs encoding fusion proteins of SARS-CoV-2 WA1 spike, S2P and S6P, which consist of the corresponding ectodomain (amino acids (aa) 1-1206) fused to HBsAg (aa 1-226) by GS linkers of varying lengths (FIGS. 1A, 1B). After transfection into Expi293 cells, these constructs expressed proteins that can be detected in the 30% to 65% sucrose fractions after ultracentrifugation using a sucrose gradient. These fractions from all tested constructs showed binding to anti-HBsAg antibody and four mAbs specific to SARS-CoV-2 spike: NTD mAb S652-118, RBD mAbs A23-58.1 and LY-CoV555, and S2 mAb WS6 (FIG. 6, shown only for S6P—HBsAgs). Small fractions of WA1 spike and S2P formed well-defined nanoparticles. S6P-8-HBsAg from the 50% sucrose faction, and S6P-12-HBsAg and S6P-16-HBsAg from 50% and 65% sucrose fractions formed well-defined nanoparticles (FIG. 1C). These nanoparticles had diameters of ˜70 nm, with a yield of 12 to 16 mg/L for each construct. In these HBsAg nanoparticles, the S6P ectodomain in its prefusion conformation was displayed on the surface. Image analysis quantifying the numbers of spike trimers suggested up to 80 trimers per nanoparticle.

SARS-CoV-2 S6P—HBsAg Nanoparticles can Bind Human ACE2 and Diverse SARS-CoV-2 mAbs

[0215] To characterize these SARS-CoV-2 S6P—HBsAg nanoparticles, we tested the binding of purified S6P-8-HBsAg, S6P-12-HBsAg and S6P-16-HBsAg nanoparticles to human ACE2, as ACE2 is one of the primary receptors for SARS-CoV-2. WA1 S2P and S6P recombinant proteins were used as controls, as they adopt stabilized prefusion conformation (Wrapp et al., Science, 2020. 367 (6483): p. 4; Hsieh et al., Science, 2020. 369 (6510): p. 5). While S2P and S6P bound to human ACE2 with similar patterns (FIG. 1D), all three S6P—HBsAgs showed moderately weaker binding to human ACE2 than S2P and S6P. Among these three types of nanoparticles, S6P-8-HBsAg appeared to be the weakest binder and S6P-16-HBsAg was the strongest binder.

[0216] To monitor whether individual domains of SARS-CoV-2 spike within the nanoparticles are accessible, we evaluated the antigenicity of these three S6P—HBsAgs. mAbs specific to the NTD, SD1, S2 and RBD domains of SARS-CoV-2 spike were used for this evaluation (Table 3). S2P and S6P showed nearly identical binding profiles to NTD mAbs 4A8 and 4-8, SD1 mAb A20-36.1, and all tested RBD mAbs (FIGS. 1D, 7). S6P exhibited marginally higher affinities to NTD mAbs S652-118, 4-19 and 1-68, S2 mAbs S2P6 and WS-6, and remarkably higher affinity to S2 mAb S652-112 than S2P. Compared with S2P and S6P, the three S6P—HBsAgs showed weaker binding to all tested mAbs specific to the NTD, SD1, S2 and RBD domains of SARS-CoV-2 spike. While S6P-8-HBsAg and S6P-12-HBsAg showed similar binding affinities to most tested mAbs, S6P-8-HBsAg exhibited slightly lower affinities to NTD mAbs S652-118, 4-19 and 1-68, SD1 mAb A20-36.1, and S2 mAb S652-112. (The references for these mAbs are listed in Table 3). Among these three types of nanoparticles, S6P-16-HBsAg exhibited the highest affinities to all tested mAbs specific to the NTD, SD1, S2 and RBD domains of SARS-CoV-2 spike. Based on these antigenicity data, we chose S6P-12-HBsAg and S6P-16-HBsAg for immunogenicity studies.

TABLE 3
mAbs used in this study to evaluate the antigenicity
of SARS-CoV-2 S6P-HBsAg nanoparticles

| | Targeting | | |
|---|---|---|---|
| | domain of | | |
| | SARS-CoV-2 | Class of | |
| Antibody | spike | RBD mAbs | Reference |
| 4A8 | NTD | | Chi et al., Science, 2020. |
| | | | 369(6504): p. 6. |
| S652-118 | NTD | | Zhou et al., Cell Rep, 2020. |
| | | | 33(4). |
| 4-19 | NTD | | Liu et al., Nature, 2020. |
| | | | 584(7821): p. 7. |
| 4-8 | NTD | | Liu et al., Nature, 2020. |
| | | | 584(7821): p. 7. |
| 1-68 | NTD | | Liu et al., Nature, 2020. |
| | | | 584(7821): p. 7. |
| A20-36.1 | SD1 | | Corbett et al., Science, 2021. |
| | | | 374(6573): p. 11. |
| B1-182.1 | RBD up | Class I | Wang et al., Science, 2021. |
| | | | 373(6556). |
| S2E12 | RBD up | Class I | Tortorici et al., Science, 2020. |
| | | | 370(6519): p. 8. |
| REGN10933 | RBD up | Class I | Baum et al., Science, 2020. |
| | | | 370(6520): p. 16.; Drouin et al., |
| | | | Viruses, 2021. 13(7). |
| CB6 | RBD up | Class I | Shi et al., Nature, 2020. |
| | | | 584(7819): p. 5. |
| A23-58.1 | RBD up | Class I | Wang et al., Science, 2021. |
| | | | 373(6556). |
| A19-46.1 | RBD | Class II | Wang et al., Science, 2021. |
| | | | 373(6556); Zhou et al., |
| | | | Science, 2022. |
| LY-CoV555 | RBD | Class II | Jones et al., bioRxiv., 2020; |
| | | | Oct 9;2020.09.30.318972; |
| | | | Gottlieb et al., JAMA, 2021. |
| | | | 325(7): p. 13. |
| LY-CoV1404 | RBD | Class III | Westendorf et al., bioRxiv, 2022. |
| | | | 2021.04.30.442182. |
| A19-61.1 | RBD | Class III | Wang et al., Science, 2021. |
| | | | 373(6556). |
| REGN10987 | RBD | Class III | Baum et al., Science, 2020. |
| | | | 370(6520): p. 16.; Drouin et al., |
| | | | Viruses, 2021. 13(7). |
| S309 | RBD | Class III | Pinto et al., Nature, 2020. |
| | | | 583(7815): p. 6. |
| ADG2 | RBD | Class I/IV | Zhou et al., Science, 2022.; |
| | | | Rappazzo et al., Science, 2021. |
| | | | 371(6531): p. 7.; Liu et al., |
| | | | Nature, 2022. 602(7898): |
| | | | p. 6. |
| DH1047 | RBD | Class I/IV | Liu et al., Nature, 2022. |
| | | | 602(7898): p. 6.; |
| | | | Martinez et al., Sci Transl |
| | | | Med, 2022. 14(629). |
| S2H97 | RBD | Class V | Tortorici et al., Science, |
| | | | 2020. 370(6519): p. 8. |
| S2P6 | S2 | | Pinto et al., Science, 2021. |
| | | | 373(6559): p. 8. |
| S652-112 | S2 | | Zhou et al., Cell Rep, 2020. |
| | | | 33(4). |
| WS6 | S2 | | Shi et al., bioRxiv, 2022 Jan |
| | | | 26; 2022.01.25.477770. |

### DNA Encoding SARS-CoV-2 S6P—HBsAgs Elicits Potent Binding and Neutralizing Antibody Responses Against WA1

[0217] The immunogenicity of S6P-12-HBsAg and S6P-16-HBsAg was assessed in 6- to 8-week-old BALB/cJ mice (FIG. 2A). With two intramuscular immunizations plus electroporation spaced 4-week apart, 10, 2 and 0.4 μg of S6P-12-HBsAg or S6P-16-HBsAg elicited potent binding antibodies to WA1 S2P, RBD and NTD domains (FIG. 8). The geometric mean titers (GMTs) increased from week 2 to week 6. The GMTs against S2P or RBD elicited by S6P—HBsAgs were comparable to those elicited by the same dose of non-nanoparticle forms of stabilized spikes S2P (1-1206), S6P (1-1206) and S2P (1-1273) at week 6. 0.4 μg of S6P—HBsAg elicited lower GMTs than the same dose of soluble S2P and S6P. Due to the limited volume of sera available from mice immunized with S2P (1-1273), we did not perform ELISA binding to RBD or NTD for these sera.

[0218] The neutralization potency elicited by SARS-CoV-2 S6P—HBsAg nanoparticles was tested using lentiviral-based WA1 pseudovirus in sera collected at 2 weeks post the second immunization. The same dose of S2P (1-1206), S6P (1-1206) and S2P (1-1273) matching the sequence of mRNA-1273 elicited comparable ID50s (FIG. 2B). Ten, 2 and 0.4 μg S6P-12-HBsAg or S6P-16-HBsAg DNA elicited 3- to 26.5-fold higher ID50s than the same dose of these three non-nanoparticle forms of stabilized spikes (Table 4). Two and 0.4 μg S6P-12-HBsAg or S6P-16-HBsAg DNA elicited significantly higher geometric mean ID50s than those elicited by the same or higher dose of non-nanoparticle forms of stabilized spikes (FIG. 2B, Table 5). Similar results were obtained for ID80s against WA1 pseudovirus (FIG. 9).

TABLE 4
Geometric mean neutralization ID50 titers against
WA1 pseudovirus at week 6 (to FIG. 2B)

| | S2P | S6P | S2P | S6P-12- | S6P-16- |
|---|---|---|---|---|---|
| Immunogen | (1-1206) | (1-1206) | (1-1273) | HBsAg | HBsAg |
| Dose | 10 μg | | | | |
| GMT | 207 | 181 | 145 | 892 | 958 |
| Fold of | 1.0 | 0.9 | 0.7 | 4.3 | 4.6 |
| Change | 1.1 | 1.0 | 0.8 | 4.9 | 5.3 |
| in GMT | 1.4 | 1.2 | 1.0 | 6.2 | 6.6 |
| Overall Fold | | | | 4.3~6.2 | 4.6~6.6 |
| of Change | | | | | |
| in GMT | | | | | |
| Dose | 2 μg | | | | |
| GMT | 138 | 53 | 256 | 1406 | 771 |
| Fold of | 1.0 | 0.4 | 1.9 | 10.2 | 5.6 |
| Change | 2.6 | 1.0 | 4.8 | 26.5 | 14.5 |
| in GMT | 0.5 | 0.2 | 1.0 | 5.5 | 3.0 |
| Overall Fold | | | | 5.5~26.5 | 3~14.5 |
| of Change | | | | | |
| in GMT | | | | | |
| Dose | 0.4 μg | | | | |
| GMT | 70 | 61 | 87 | 503 | 374 |
| Fold of | 1.0 | 0.9 | 1.2 | 7.2 | 5.3 |
| Change | 1.1 | 1.0 | 1.4 | 8.2 | 6.1 |
| in GMT | 0.8 | 0.7 | 1.0 | 5.8 | 4.3 |
| Overall Fold | | | | 5.8~8.2 | 4.3~6.1 |
| of Change | | | | | |
| in GMT | | | | | |

In Table 4, GMT: Geometric mean titer. Fold of change was calculated in comparison with the same dose of non-nanoparticle form of spike.

TABLE 5
Statistical analyses of geometric mean ID50s at
week 6 against WA1 pseudovirus (to FIG. 2B)

| Nanoparticle | Non-nanoparticle spike | p value |
|---|---|---|
| 2 μg S6P-12-HBsAg | 10 μg S6P(1-1206) | 0.0408 |
| | 2 μg S2P(1-1206) | 0.0103 |
| | 2 μg S6P(1-1206) | <0.0001 |
| 0.4 μg S6P-12-HBsAg | 2 μg S6P(1-1206) | 0.0144 |
| | 0.4 μg S6P(1-1206) | 0.0296 |
| 2 μg S6P-16-HBsAg | 2 μg S6P(1-1206) | 0.0012 |
| 10 μg S6P-12-HBsAg | 10 μg S2P(1-1273) | 0.043 |
| 2 μg S6P-12-HBsAg | 2 μg S2P(1-1273) | 0.0345 |
| 0.4 μg S6P-12-HBsAg | 0.4 μg S2P(1-1273) | 0.0341 |
| 10 μg S6P-16-HBsAg | 10 μg S2P(1-1273) | 0.0286 |

The statistical analyses shown in Table 5 were performed using the Two-way ANOVA test for the comparison between S6P—HBsAg and soluble S2P (1-1206), S6P (1-1206). The comparison between the same dose of S6P—HBsAg and S2P (1-1273) was done using two tailed Mann-Whitney test with Dunn's multiple comparisons test.

### DNA Encoding SARS-CoV-2 S6P—HBsAgs Elicits Potent Binding and Neutralizing Antibody Responses Against SARS-CoV-2 Variants

[0219] As SARS-CoV-2 variants D614G, B.1.351 (Beta), B.1.617.2 (Delta) and B.1.1.529 (Omicron BA.1) pose greater risk to public health than WA1, we also tested whether S6P—HBsAgs can elicit potent antibody responses against these variants. S6P-12-HBsAg and S6P-16-HBsAg elicited binding antibody responses to B.1.351, B.1.617.2 and B.1.1.529 S2Ps in a dose-dependent manner at both weeks 2 and 6 (FIG. 10). The GMTs increased from week 2 to week 6. At each time point, 0.4 μg S6P—HBsAgs elicited substantially lower GMTs against all three variant S2Ps than the same dose of soluble S2P or S6P.

[0220] Ten, 2 and 0.4 μg of soluble S2P and S6P elicited similar levels of neutralization potency against each individual pseudovirus at each dose (FIG. 3, Table 6). At all three doses, S6P-12-HBsAg or S6P-16-HBsAg elicited substantially higher geometric mean ID50s against D614G, B.1.351 and B.1.617.2 pseudoviruses than the same dose of soluble S2P and S6P. Two μg of S6P-12-HBsAg and 10 or 2 μg S6P-16-HBsAg elicited significantly higher neutralization potency than the same or higher doses of soluble S2P or S6P for D614G and B.1.617.2 pseudoviruses (FIG. 3, Table 7). For B.1.1.529 pseudovirus, S6P—HBsAgs elicited marginally increased geometric mean ID50s compared with soluble S2P and S6P. Similar results were obtained for ID80 titers (FIG. 9).

TABLE 6
Geometric mean neutralization ID50 titers against SARS-
CoV-2 variant pseudovirus at week 6 (to FIG. 3)

| | S2P | S6P | S6P-12- | S6P-16- |
|---|---|---|---|---|
| Immunogen | (1-1273) | (1-1206) | HBsAg | HBsAg |

Dose 10 μg

| | | | | | |
|---|---|---|---|---|---|
| D614G | GMT | 550 | 876 | 5237 | 3376 |
| | Fold Change | 897 | 965 | 3444 | 3122 |
| | in GMT | 1.0 | 1.1 | 3.8 | 3.5 |
| | Overall Fold | 0.9 | 1.0 | 3.6 | 3.2 |
| | Change in | | | | |
| | GMT | | | | |
| B.1.351 | GMT | 60 | 128 | 336 | 487 |
| | Fold Change | 1.0 | 2.1 | 5.6 | 8.1 |
| | in GMT | 0.5 | 1.0 | 2.6 | 3.8 |
| | Overall Fold | | | 2.6~5.6 | 3.8~8.1 |
| | Change in | | | | |
| | GMT | | | | |
| B.1.617.2 | GMT | 550 | 876 | 5237 | 3376 |
| | Fold Change | 44 | 56 | 319 | 399 |
| | in GMT | 1.0 | 1.3 | 7.3 | 9.1 |
| | Overall Fold | 0.8 | 1.0 | 5.7 | 7.1 |
| | Change in | | | | |
| | GMT | | | | |
| B.1.1.529 | GMT | 42 | 49 | 164 | 138 |
| (BA.1) | Fold Change | 1.0 | 1.2 | 3.9 | 3.3 |
| | in GMT | 0.9 | 1.0 | 3.3 | 2.8 |
| | Overall Fold | | | 3.3~3.9 | 2.8~3.3 |
| | Change in | | | | |
| | GMT | | | | |

Dose 2 μg

| | | | | | |
|---|---|---|---|---|---|
| D614G | GMT | 238 | 126 | 2826 | 5775 |
| | Fold Change | 453 | 218 | 3565 | 2513 |
| | in GMT | 1.0 | 0.5 | 7.9 | 5.5 |
| | Overall Fold | 2.1 | 1.0 | 16.4 | 11.5 |
| | Change in | | | | |
| | GMT | | | | |
| B.1.351 | GMT | 60 | 86 | 400 | 101 |
| | Fold Change | 1.0 | 1.4 | 6.7 | 1.7 |
| | in GMT | 0.7 | 1.0 | 4.7 | 1.2 |
| | Overall Fold | | | 4.7~6.7 | 1.2~1.7 |
| | Change in | | | | |
| | GMT | | | | |
| B.1.617.2 | GMT | 36 | 34 | 276 | 353 |
| | Fold Change | 1.0 | 0.9 | 7.7 | 9.8 |
| | in GMT | 1.1 | 1.0 | 8.1 | 10.4 |
| | Overall Fold | | | 7.7~8.1 | 9.8~10.4 |
| | Change in | | | | |
| | GMT | | | | |
| B.1.1.529 | GMT | 37 | 35 | 23 | 62 |
| (BA.1) | Fold Change | 1.0 | 0.9 | 0.6 | 1.7 |
| | in GMT | 1.1 | 1.0 | 0.7 | 1.8 |
| | Overall Fold | | | 0.6~0.7 | 1.7~1.8 |
| | Change in | | | | |
| | GMT | | | | |

Dose 0.4 μg

| | | | | | |
|---|---|---|---|---|---|
| D614G | GMT | 268 | 304 | 791 | 722 |
| | Fold of Change | 1.0 | 1.1 | 3.0 | 2.7 |
| | in GMT | 0.9 | 1.0 | 2.6 | 2.4 |
| | Overall Fold | | | 2.6~3.0 | 2.4~2.7 |
| | of Change | | | | |
| | in GMT | | | | |
| B.1.351 | GMT | 35 | 27 | 51 | 85 |
| | Fold of Change | 1.0 | 0.8 | 1.5 | 2.4 |
| | in GMT | 1.3 | 1.0 | 1.9 | 3.1 |
| | Overall Fold | | | 1.5~1.9 | 2.4~3.1 |
| | of Change | | | | |
| | in GMT | | | | |
| B.1.617.2 | GMT | 47 | 52 | 148 | 68 |
| | Fold of Change | 1.0 | 1.1 | 3.1 | 1.4 |
| | in GMT | 0.9 | 1.0 | 2.8 | 1.3 |
| | Overall Fold | | | 2.8~3.1 | 1.3~1.4 |
| | of Change | | | | |
| | in GMT | | | | |
| B.1.1.529 | GMT | 24 | 20 | 44 | 28 |
| (BA.1) | Fold of Change | 1.0 | 0.8 | 1.8 | 1.2 |
| | in GMT | 1.2 | 1.0 | 2.2 | 1.4 |
| | Overall Fold | | | 1.8~2.2 | 1.2~1.4 |
| | of Change | | | | |
| | in GMT | | | | |

TABLE 7
Statistical analyses of geometric mean ID50s at week 6
against SARS-CoV-2 variant pseudoviruses (to FIG. 3)

| Nanoparticle | Non-nanoparticle spike | Pseudovirus | p value |
|---|---|---|---|
| 2 μg S6P-12-HBsAg | 2 μg S6P(1-1206) | D614G | 0.0013 |
| 2 μg S6P-16-HBsAg | 2 μg S6P(1-1206) | | 0.0095 |
| 2 μg S6P-12-HBsAg | 2 μg S2P(1-1206) | B.1.617.2 | 0.0383 |
| | 2 μg S6P(1-1206) | | 0.0312 |
| 10 μg S6P-16-HBsAg | 10 μg S2P(1-1206) | | 0.0172 |
| 2 μg S6P-16-HBsAg | 10 μg S2P(1-1206) | | 0.0324 |
| | 2 μg S2P(1-1206) | | 0.0106 |
| | 2 μg S6P(1-1206) | | 0.0084 |

[0221] The statistical analyses shown in Table 7 were performed using the two-way ANOVA test.

### DNA Encoding SARS-CoV-2 S6P—HBsAgs Elicits Durable nAb Responses

[0222] As S6P—HBsAgs elicited potent nAb responses at week 6 against SARS-CoV-2 WA1 and diverse variant pseudoviruses, we assessed the durability of the neutralization potency elicited by S6P—HBsAg. At week 14, the neutralization ID50s and ID80s elicited by S6P-12-HBsAg or S6P-16-HBsAg were maintained at significantly higher levels than those elicited by the same or higher dose of soluble S2P and S6P (FIG. 11). The ID50s and ID80s elicited by these S6P—HBsAgs at week 14 are comparable to those at week 6. Notably, the ID50s elicited by 0.4 μg of S6P-12-HBsAg or S6P-16-HBsAg increased from week 6 to week 14, though without statistical significance.

[0223] Based on the potent neutralizing antibody response at week 14 elicited by S6P—HBsAg, we further monitored binding antibodies in the animal sera to WA1 S2P and HBsAg from week 0 to week 45. Potent anti-WA1 S2P antibodies were detected from week 6 to week 45, for mice immunized twice with S2P (1-1206), S6P (1-1206), S6P-12-HBsAg and S6P-16-HBsAg at 10, 2 and 0.4 μg doses (FIG. 12). The anti-HBsAg binding antibodies were only detected from week 6 to week 45 in 10 and 2 μg of S6P—HBsAg groups, with significantly lower titers than the anti-S2P antibodies (FIG. 13).

[0224] Encouraged by the durable anti-S2P antibody response elicited by S6P—HBsAg, we further tested the neutralization potency of the pooled sera from each group from week 22 to week 45. At 10 μg dose, the neutralization activity was detected up to week 22 for soluble S2P and up to week 45 for soluble S6P and S6P—HBsAg at comparable levels (FIG. 4, 14). While the neutralization activity was only detected up to week 14 for 2 and 0.4 μg soluble S2P and S6P groups, the neutralization activity was maintained at substantially higher levels through week 45 for the same dose of S6P—HBsAg groups, with the only exception been the 0.4 μg S6P-12-HBsAg group which showed no neutralization potency at week 45.

DNA Encoding SARS-CoV-2 S6P—HBsAgs Elicits Greater nAb Responses Against WA1 and B.1.1.529 Pseudoviruses than DNA Encoding S2P (1-1273) or Soluble S6P in Mice Preimmunized with RECOMBIVAX HB®

[0225] As a large population worldwide has been exposed to HBsAg by either natural infection or hepatitis B vaccination, we tested whether SARS-CoV-2 S6P—HBsAgs can elicit potent antibody responses against SARS-CoV-2 in mice preimmunized with RECOMBIVAX HB®. RECOMBIVAX HB® is a vaccine against hepatitis B virus (HBV) manufactured by Merck. Two DNA immunizations were administered at weeks 4 and 8 to mice preimmunized with RECOMBIVAX HB® at week 0 (FIG. 5A). Potent anti-HBsAg antibodies were detected from all groups of animals at weeks 3, 6 and 10 (FIG. 15). Following DNA immunizations plus electroporation, 10, 2 and 0.4 μg S6P—HBsAg elicited comparable levels of anti-WA1 S2P antibodies at week 6 to those elicited by the same dose of non-nanoparticle forms of S2P (1-1273) and S6P (1-1206) (FIG. 16). At 2 weeks post the 2nd immunization, 2 and 0.4 μg S6P-16-HBsAg elicited significantly higher levels of anti-S2P antibodies than the same dose of S2P (1-1273).

[0226] In terms of neutralizing antibody responses, we detected significantly increased WA1 ID50s and ID80s in 2 and 0.4 μg of S6P-12-HBsAg and S6P-16-HBsAg groups than in the same dose of spike groups (FIG. 5B, 17A, Table 8). 0.4 to 10 μg S6P—HBsAgs elicited 6.1˜ 24.3-fold and 3.9˜ 45.8-fold higher geometric mean ID50s than the same dose of S2P (1-1273) and soluble S6P, respectively (Table 9). Between mice without and with RECOMBIVAX HB® pre-vaccination, we observed up to 7.5-fold difference in ID50s at 2 weeks post the second DNA immunization (Table 10). The ID80s at week 10 from mice preimmunized with RECOMBIVAX HB® in the 10 and 2 μg S6P—HBsAg groups were comparable to those at week 6 in mice without RECOMBIVAX HB® preimmunization but immunized with the same immunogens (FIG. 18). Two immunizations of S6P—HBsAgs also elicited potent neutralizing antibody responses against BA.1 pseudovirus, with significantly higher ID50s and ID80s than those elicited by S2P (1-1273) and S6P (1-1206) (FIG. 5B, 17B).

[0227] To test whether S6P—HBsAg can also serve as a booster immunization for HBV vaccine, we tested the neutralization potency of the mouse sera against HBV. Neutralization potency against live HBV viruses were only detected in mice preimmunized with RECOMBIVAX HB® followed by two immunizations of 10 μg of SARS-CoV-2 S2P (1-1273). S6P (1-1206). S6P-12-HBsAg or S6P-16-HBsAg DNAs (FIG. 17C). The neutralization potency appeared to be higher in 10 μg S2P (1-1273) and S6P (1-1206) groups than in 10 μg of either S6P—HBsAg group.

TABLE 8
Statistical analyses of geometric mean ID50s at week 10 for mice
preimmunized with RECOMBIVAX HB ® (to FIG. 5)

| Nanoparticle | Non-nanoparticle spike | Pseudovirus | p value |
|---|---|---|---|
| 2 μg S6P-12-HBsAg | 2 μg S6P(1-1206) | WA1 | 0.0054 |
| 0.4 μg S6P-12-HBsAg | 0.4 μg S6P(1-1206) | | 0.0405 |
| 2 μg S6P-16-HBsAg | 2 μg S2P(1-1273) | | 0.0037 |
| | 2 μg S6P(1-1206) | | 0.0002 |
| 0.4 μg S6P-16-HBsAg | 0.4 μg S6P(1-1206) | | 0.0059 |
| 2 μg S6P-12-HBsAg | 10 μg S2P(1-1273) | Omicron BA.1 | 0.0036 |
| | 2 μg S2P(1-1273) | | 0.0034 |
| | 10 μg S6P(1-1206) | | 0.006 |
| | 2 μg S6P(1-1206) | | 0.0009 |
| 10 μg S6P-16-HBsAg | 10 μg S2P(1-1273) | | <0.0001 |
| | 10 μg S6P(1-1206) | | <0.0001 |

[0228] The statistical analyses shown in Table 8 were performed using the Two-way ANOVA test.

TABLE 9
Geometric mean neutralization ID50 titers at week 10 in mice
preimmunized with RECOMBIVAX HB ® (to FIG. 5)

| | S2P | S6P | S6P-12- | S6P-16- |
|---|---|---|---|---|
| Immunogen | (1-1273) | (1-1206) | HBsAg | HBsAg |

Dose 10 μg

| | | | | | |
|---|---|---|---|---|---|
| WA1 | GMT | 550 | 876 | 5237 | 3376 |
| | Fold of | 1.0 | 1.6 | 9.5 | 6.1 |
| | Change | 0.6 | 1.0 | 6.0 | 3.9 |
| | in GMT | | | | |
| | Overall Fold | | | 6.0~9.5 | 3.9~6.1 |
| | of Change | | | | |
| | in GMT | | | | |
| B.1.1.529 | GMT | 22 | 27 | 137 | 458 |
| (BA.1) | Fold of | 1.0 | 1.2 | 6.2 | 20.8 |
| | Change | 0.8 | 1.0 | 5.1 | 17.0 |
| | in GMT | | | | |
| | Overall Fold | | | 5.1~6.2 | 17.0~20.8 |
| | of Change | | | | |
| | in GMT | | | | |

Dose 2 μg

| | | | | | |
|---|---|---|---|---|---|
| WA1 | GMT | 238 | 126 | 2826 | 5775 |
| | Fold of | 1.0 | 0.5 | 11.9 | 24.3 |
| | Change | 1.9 | 1.0 | 22.4 | 45.8 |
| | in GMT | | | | |
| | Overall Fold | | | 11.9~22.4 | 24.3~45.8 |
| | of Change | | | | |
| | in GMT | | | | |
| B.1.1.529 | GMT | 24 | 20 | 239 | 99 |
| (BA.1) | Fold of | 1.0 | 0.8 | 10.0 | 4.1 |
| | Change | 1.2 | 1.0 | 12.0 | 5.0 |
| | in GMT | | | | |
| | Overall Fold | | | 10.0~12.0 | 4.1~5.0 |
| | of Change | | | | |
| | in GMT | | | | |

Dose 0.4 μg

| | | | | | |
|---|---|---|---|---|---|
| WA1 | GMT | 103 | 46 | 633 | 1010 |
| | Fold of | 1.0 | 0.4 | 6.1 | 9.8 |
| | Change | 2.2 | 1.0 | 13.8 | 22.0 |
| | in GMT | | | | |
| | Overall Fold | | | 6.1~13.8 | 9.8~22.0 |
| | of Change | | | | |
| | in GMT | | | | |
| B.1.1.529 | GMT | 20 | 25 | 47 | 56 |
| (BA.1) | Fold of | 1.0 | 1.3 | 2.4 | 2.8 |
| | Change | 0.8 | 1.0 | 1.9 | 2.2 |
| | in GMT | | | | |
| | Overall Fold | | | 1.9~2.4 | 2.2~2.8 |
| | of Change | | | | |
| | in GMT | | | | |

[0229] In Table 9, GMT: Geometric mean titer. Fold of change was calculated in comparison with the ID50 against the same pseudovirus elicited by the same dose of non-nanoparticle form of spike.

TABLE 10
Comparison of ID50s between mice with and without RECOMBIVAX HB ® preimmunization.

| | | Geometric mean ID50 against WA1 | | | Geometric mean ID50 against BA. 1 | | |
|---|---|---|---|---|---|---|---|
| Prime & | | RECOMBIVAX | RECOMBIVAX | | RECOMBIVAX | RECOMBIVAX | |
| boost | Dose | HB ® − | HB ® + | Ratio | HB ® − | HB ® + | Ratio |
| immunogen | (μg) | Week 6 | Week 10 | HB⁺/HB⁻ | Week 6 | Week 10 | HB⁺/HB⁻ |
| S6P | 10 | 181 | 876 | 4.8 | 49 | 27 | 0.6 |
| (1-1206) | 2 | 53 | 126 | 2.4 | 35 | 20 | 0.6 |
| | 0.4 | 61 | 46 | 0.8 | 20 | 25 | 1.3 |
| S6P-12- | 10 | 892 | 5237 | 5.9 | 164 | 137 | 0.8 |
| HBsAg | 2 | 1406 | 2826 | 2.0 | 23 | 239 | 10.4 |
| | 0.4 | 503 | 633 | 1.3 | 44 | 47 | 1.1 |
| S6P-16- | 10 | 958 | 3376 | 3.5 | 138 | 458 | 3.3 |
| HBsAg | 2 | 771 | 5775 | 7.5 | 62 | 99 | 1.6 |
| | 0.4 | 374 | 1010 | 2.7 | 28 | 56 | 2.0 |
| S2P | 10 | 145 | 550 | 3.8 | 20 | 22 | 1.1 |
| (1-1273) | 2 | 256 | 238 | 0.9 | 21.8 | 24 | 1.1 |
| | 0.4 | 87 | 103 | 1.2 | 20 | 20 | 1.0 |

### DISCUSSION

[0230] In this study, we designed and characterized self-assembling SARS-CoV-2 spike-HBsAg nanoparticles and assessed their immunogenicity in mice via genetic delivery. We show that these HBsAg nanoparticles displaying SARS-CoV-2 S6P elicit potent, broad and durable immune responses compared to non-nanoparticle form of stabilized SARS-CoV-2 spikes. Additionally, preimmunization with an HBV vaccine leads to a further enhancement of the HBsAg-nanoparticle-elicited immune responses against SARS-CoV-2 and its variants.

[0231] SARS-CoV-2 spike exhibits a metastable prefusion conformation that spontaneously transitions to its post-fusion conformation. The two-proline-stabilized SARS-CoV-2 spike S2P in its prefusion conformation has been used in the current COVID-19 vaccines from Moderna, Pfizer-BioNTech and Johnson & Johnson. We have screened WA1 spike, S2P and S6P for nanoparticle formation on a HBsAg core. S6P succeeded to form well-defined HBsAg nanoparticles whereas small fractions of wild type spike and S2P formed nanoparticles. This may be due to the metastability of SARS-CoV-2 spike. S2P is not as stable as S6P, as four proline substitutions in S6P in addition to the K986P and V987P substitutions further stabilize its prefusion conformation. Both S6P-12-HBsAg and S6P-16-HBsAg bound well to human ACE2 and mAbs specific to the RBD or NTD domain of SARS-CoV-2 spike, suggesting the accessibility of the neutralizing epitopes in the S6P—HBsAg nanoparticles.

[0232] DNA encoding S6P-12-HBsAg and S6P-16-HBsAg elicited potent nAb responses to SARS-CoV-2 and its variants. The lower binding antibody levels but higher nAb responses elicited by 0.4 μg S6P—HBsAg than those elicited by the same dose of soluble S2P and S6P are indicative of the higher immunogenicity of S6P—HBsAg. In addition, the nAb responses elicited by S6P—HBsAg persisted through week 45 and is more durable than those elicited by soluble S2P and S6P via genetic delivery.

[0233] The neutralization potency induced by DNA delivery of S6P—HBsAgs is comparable to that elicited by intramuscular delivery of 1 μg mRNA-1273 or SARS-CoV-2 S2P protein. Using the same route of genetic delivery, S6P—HBsAgs elicited substantially higher neutralization potency than S2P (1-1273), whose coding sequence matches that in mRNA-1273. Similar observations were noted in mice preimmunized with an HBV vaccine, with further significantly enhanced potency. The higher neutralization potency elicited by S6P—HBsAgs than by non-nanoparticle forms of stabilized spike alone could be contributed by several factors. First, S6P—HBsAg nanoparticles with diameters of ˜ 70 nm are much larger than the SARS-CoV-2 spike. The large size of these nanoparticles may result in more efficient internalization of the spike by antigen presenting cells (APCs) and retention of the spike on lymph node follicles. The repetitive array of the spikes on S6P—HBsAg nanoparticles may also enable efficient binding and activation of multiple B cell receptors. In addition, the antibody responses elicited by S6P—HBsAgs were mainly directed against the spikes displayed on the HBsAg nanoparticles as opposed to HBsAg, suggesting efficient presentation of the spike on the surface of these nanoparticles by the HBsAg core.

[0234] Two immunizations of S6P—HBsAgs elicited robust neutralization potency against B.1.1.529 (Omicron BA.1) pseudovirus, in mice preimmunized with RECOMBIVAX HB®. While a 3rd dose of mRNA vaccines is needed to offer better protection against Omicron variants (Tseng et al., Nat Med, 28, 1063-1071, 2022; Lauring et al., BMJ, 2022. 376 (e069761)) and a fourth dose retains low efficacy in preventing Omicron infections (Regev-Yochay et al., medRxiv, 2022.02.15.22270948), and the bivalent COVID-19 vaccines do not resolve the durability issue, S6P—HBsAgs may provide a strategy to offer longer and better protection against SARS-CoV-2 in populations that have previously exposed to HBsAg by infection or vaccination. As per WHO estimates, approximately ⅓ of the global population have been infected with HBV in 2010. The immunization rate with 3 doses of HBV vaccine during infancy has also reached 85% worldwide in 2019. This high rate of exposure to HBsAg in global population further highlights the potential of SARS-CoV-2 S6P—HBsAg as a genetic vaccine platform for inducing more potent and durable protection against SARS-CoV-2.

[0235] Many nanoparticle designs require an additional protein conjugation step, which does not allow them to be amenable to gene-based delivery. Our S6P—HBsAg designs exhibit advantages as genetic vaccine candidates over similar nanoparticle vaccine designs utilizing an additional conjugation step. Further, the utilization of spike in our designs enables more neutralizing epitopes than RBD-based vaccine designs.

[0236] In conclusion, SARS-CoV-2 S6P—HBsAg can elicit more potent and durable nAb responses against diverse SARS-CoV-2 strains than non-nanoparticle form of stabilized spikes, including SARS-CoV-2 full-length S2P with its coding sequence matching that in mRNA-1273. The nAb responses elicited by S6P—HBsAg can persist 7 months longer than soluble stabilized spikes and were enhanced by pre-exposure to HBsAg.

### Methods

### DNA Construct Design

[0237] The HBsAg nanoparticles displaying SARS-CoV-2 spike, S2P or S6P were designed as spike-HBsAg fusion proteins. The coding sequence of the ectodomain (aa 1-1206) of SARS-CoV-2 WA1 spike (NC_045512.2), 2P- or 6P-stabilized mutant (S2P or S6P) (Wrapp et al., Science, 2020. 367 (6483): p. 4; Hsieh et al., Science, 2020. 369 (6510): p. 5.) was joined with the coding sequence of HBsAg (aa 1-226, AET06188.1). The linker was made up of varying repeats of GS dipeptide. The coding sequences of SARS-CoV-2 spike-HBsAgs were inserted into the CMVR8400 vector via XbaI and BamHI sites. The ectodomain of SARS-CoV-2 S2P or S6P, as well as the full-length S2P (aa 1-1273) were also constructed in the CMVR8400 vector via the same restriction sites as above, respectively. Each construct was human codon-optimized, synthesized and confirmed by DNA sequencing.

### Protein Expression and Purification

[0238] The SARS-CoV-2 spike-HBsAg plasmids were transfected into Expi293F cells using ExpiFectamine 293 transfection kit following the manufacturer's instructions. The transfected culture was grown at 37° C. for 5 days before harvest. The culture was then spun down at 10,000×g at 20° C. for 30 min. The supernatant was collected and passed through a 0.2 μm filter. The supernatant was further spun through 20% sucrose cushion in a buffer containing 20 mM MES, 150 mM NaCl, pH 6.0. The ultracentrifugation was performed with a Surespin rotor at 20,000 rpm, 4° C. for 2 hours. The pellet was resuspended in a buffer containing 20 mM MES, 150 mM NaCl, pH 6.0, filtered through a 0.45 μm filter, and then spun through a sucrose gradient consisting of 1.5 ml of 20% to 65% sucrose in a buffer containing 20 mM MES, 150 mM NaCl, pH 6.0. This step of ultracentrifugation was done with a Th-641 rotor at 36,000 rpm, 4° C. for 8 hours. The sucrose fractions were collected and stored at 4° C. A dialysis against PBS buffer, pH 7.4, was performed before use. SARS-CoV-2 WA1, B.1.351, B.1.617.2 and B.1.1.529 S2Ps, and WA1 S6P were constructed and prepared as previously described (Wrapp et al., Science, 2020. 367 (6483): p. 4; Hsieh et al., Science, 2020. 369 (6510): p. 5). The tags in S2P and S6P were cleaved off and further purified by sizing column purification. Human ACE2, SARS-CoV-2 RBD, NTD recombinant proteins were purified as described (Corbett et al., Nature, 2020. 586 (7830): p. 5; Zhou et al., Cell Host Microbe, 2020. 28 (6): p. 13). The purified proteins were aliquoted, frozen in liquid nitrogen, and kept at −80° C. before use.

### Negative-Stain Electron Microscopy

[0239] The sucrose fractions of SARS-CoV-2 spike-HBsAg fusion proteins were buffer exchanged to PBS containing 5-10% sucrose, and then applied to a freshly glow-discharged carbon-coated grid for about 15 s. The grid was washed with buffer containing 10 mM HEPES, pH 7.0, and 150 mM NaCl, followed by negative staining with 0.7% uranyl formate. Images were collected at a nominal magnification of 57,000 using EPU software on a Thermo Scientific Talos F200C electron microscope operated at 200 kV and equipped with a 4 k×4 k Ceta CCD camera or at a nominal magnification of 50,000 using SerialEM (DN, M., J Struct Biol, 2005. 152 (1): p. 16) on an FEI T20 electron microscope operated at 200 kV and equipped with an Eagle CCD camera. The corresponding pixel sizes were 0.253 and 0.22 nm. Particles were picked using in-house written software (YT, unpublished) or e2boxer from the EMAN2 software package (Tang G, P. L., Baldwin P R, Mann D S, Jiang W, Rees I, Ludtke S J., EMAN2: an extensible image processing suite for electron microscopy. J Struct Biol, 2007. 157 (1): p. 9). Reference-free 2D classification was performed using Relion (S H, S., RELION: implementation of a Bayesian approach to cryo-EM structure determination. J Struct Biol, 2012. 180 (3): p. 12).

### ELISA to Assess ACE2-Binding and Antigenicity of SARS-CoV-2 Spike—HBsAgs

[0240] ELISA plates (Thermo Fisher, 442404) were coated with 1 μg/ml of SARS-CoV-2 WA1 or variant S2P, WA1 S6P or S6P—HBsAg in PBS buffer, pH 7.4, 100 μl/well at 4° C. for 16 hours (Wrapp et al., Science, 2020. 367 (6483): p. 4). The plates were washed with PBST thrice, 300 μl per well per time and then blocked with 5% skim milk in 1× PBST at room temperature for 1 hour. The binding of SARS-CoV-2 WA1 S2P, S6P and spike-HBsAg was done with 4 μg/ml to 10 μg/ml SARS-CoV-2 mAbs (Table 3) or with 6.1 ng/ml to 100 μg/ml human ACE2 (Zhou et al., Cell Host Microbe, 2020. 28 (6): p. 13). The goat anti-human IgG Fc-HRP antibody (Invitrogen, A18817, 1/5000) was used to detect the ACE2 binding. The primary antibody incubation was done at room temperature for 30 min. Following three washes, the plates were incubated with HRP-conjugated anti-human or anti-mouse antibody ( 1/2000, Thermo Fisher) at room temperature for 30 min. The plates were then washed thrice and developed with 3,5,3′,5′-tetramethylbenzidine (TMB) (KPL) at room temperature for 10 min. After quenched with IN H₂SO₄ (Fisher), the plates were read at 450 nm with a SpectraMax Plus 384 microplate reader. The data were plotted and analyzed with GraphPad Prism.

### Immunogenicity Evaluation in Mice

[0241] The immunogenicity studies in 6- to 8-week-old female BALB/cJ mice (Jackson Laboratory) were performed in compliance with all pertinent US NIH regulations and approval from the Animal Care and Use Committee (ACUC) of the Vaccine Research Center (VRC). Pre-bleeds were collected the day before the first immunization. Plasmid DNAs encoding SARS-CoV-2 WA1 S2P (1-1206), S6P (1-1206), S6P-12-HBsAg, S6P-16-HBsAg, S2P (1-1273) were diluted prior to immunization in PBS, pH 7.4. Naïve mice were injected intramuscularly twice spaced 4-week apart in both hind legs with a total of 10, 2 or 0.4 μg plasmid DNA in 100 μl PBS, pH 7.4. S2P (1-1273) was administered twice with a 3-week interval to match the immunization regimen of BNT162b2. Mice preimmunized with 1 μg RECOMBIVAX HB® vaccine intramuscularly (Davis et al., J Immunol, 1998. 160 (2): p. 7) at week 0 received two immunizations of 10, 2 or 0.4 μg SARS-CoV-2 WA1 S2P (1-1273), S6P (1-1206), S6P-12-HBsAg and S6P-16-HBsAg DNA at week 4 and week 8, respectively. Electroporation was done following each DNA immunization with the AgilePulse System (Harvard Apparatus) using manufacturer-recommended setting (Dowd et al., Science, 2016. 354 (6309): p. 4). The electroporation was applied to the muscles at the injection sites in both hind legs. Mouse sera were collected 2 weeks post each DNA immunization, and 3 weeks post RECOMBIVAX HB® vaccination (Davis et al., J Immunol, 1998. 160 (2): p. 7).

### Serum ELISA

[0242] ELISA plates (Thermo Fisher, 442404) were coated with 1 μg/ml of SARS-CoV-2 WA1, variant S2P, or HBsAg (ProspecBio, HBS-875) in PBS, pH 7.4 at 4° C. for 16 hours (Corbett et al., Nature, 2020. 586 (7830): p. 5; Zhou et al., Cell Host Microbe, 2020. 28 (6): p. 13). Standard washes and blocking steps were done as described above. The plates were blocked for 2 hours. The sera were diluted by 100-fold in 5% skim milk in PBST. A serial 4-fold dilution for weeks 0 and 2 sera or 6-fold dilution for week 6 sera was applied to the 100-fold dilution preparations. The plates were incubated with diluted sera at room temperature for 1 hour. The HRP-conjugated anti-mouse secondary antibody (Thermo Fisher, 1/2000) was used to detect the antibody responses. The endpoint titers were calculated as the dilution that yielded an optical density equivalent to 4×background (secondary antibody alone).

### Pseudovirus Neutralization Assay

[0243] The codon-optimized SARS-CoV-2 spike (Wuhan-1, GenBank: MN908947.3; D614G, B.1.351, B.1.617.2, B.1.1.529) plasmids were used (Wang et al., Science, 2021. 373 (6556)). Pseudoviruses were generated by co-transfection of transducing plasmid pHR′ CMV-Luc encoding a luciferase reporter, lentivirus packaging plasmid pCMVd8.2, a TMPRSS2 plasmid and a spike plasmid of SARS-CoV-2 or variants into HEK293T/17 cells (ATCC CRL-11268) using Lipofectamine 3000 transfection reagent (Thermo Fisher, L3000-001); (Corbett et al., Nature, 2020. 586 (7830): p. 5; Zhou et al., Cell Host Microbe, 2020. 28 (6): p. 13; Wang et al., Science, 2021. 373 (6556); Zhou et al., Science, 376 (6591), 2022. (DOI: 10.1126/science.abn8897)). Heat-inactivated serum was mixed with the titrated pseudoviruses, incubated, and then added to pre-plated 293T-ACE2 cells (from Dr. Michael Farzan) in triplicate. Following 2 hours of incubation, wells were replenished with 150 μl of fresh media. 72 hours later, the cells were lysed and the luciferase activity was recorded in relative light units (RLU). The neutralization activity was normalized to uninfected cells as 100% neutralization and to cells infected with only pseudovirus as 0% neutralization. ID50 and ID80 titers were determined using a log (agonist) vs normalized response (variable slope) nonlinear function in GraphPad Prism.

### HBV Neutralization Assay

[0244] Group pooled sera from mice immunized with 10 μg of SARS-CoV-2 DNAs were tested for neutralization potency against live HBV viruses (subtype ayw, ImQuest BioSciences). Week 22 sera from mice without RECOMBIVAX HB® preimmunization and week 10 sera from mice with RECOMBIVAX HB® preimmunization were evaluated. HepG2-NTCP cells (Baruch S. Blumberg Institute) were seeded in a 48-well plate and incubated for 24 hours in DMEM F12 (Gibco, 11320-030) supplemented with 10% FBS, 1% Fungizone and 2 μg/mL Puromycin. Pooled sera were diluted in the medium with a 4-fold series of 7 dilutions. The diluted sera were incubated with HBV viruses (MOI: 1000) for 45 minutes at 37° C. with 5% CO₂. Following the incubation, media was removed from the pre-seeded plates. The serum/virus samples were added in triplicate to the cells and incubated for 18 to 24 hours. A neutralizing mAb against HBV H015 (Acrobiosystems, HBG-M406-50 μg) up to 1 μg/ml and Tenofovir disoproxil fumarate (TDF, Gilead) up to 1 μM were used as positive controls. The virus and compound were then removed by 5 washes and replaced with fresh media with and without H015 or TDF. This was repeated on day 4 and day 7 post infection. On day 10 the supernatant was collected and evaluated by qPCR assay. The primers and probe were from IDT and listed as follows: HBV-AD38-qF1: 5′-CCGTCTGTGCCTTCTCATCTG-3′ (SEQ ID NO: 370); HBV-AD38-qR1: 5′-AGTCCAAGAGTCCTCTTATACAAGACC-3′ (SEQ ID NO: 371); and HBV-AD38-qP1: 5′-FAM/CCGTGTGCA/ZEN/CTTCGCTTCAC-3′ BHQ1 (SEQ ID NO: 372).

[0245] In view of the many possible aspects to which the principles of the disclosed subject matter may be applied, it should be recognized that the illustrated aspects are only preferred examples of the disclosure and should not be taken as limiting the scope of the disclosure. Rather, the scope of the disclosure is defined by the following claims. We therefore claim all that comes within the scope and spirit of these claims.

The application's sequence listing, which the Patent Office published only in electronic form, follows.

SEQUENCE LISTING (372 sequences)

SEQ ID NO: 1 - protein, 1273 aa, synthetic construct
  REGION 1..1273: note = Recombinant Sequence
MFVFLVLLPLVSSQCVNLTTRTQLPPAYTNSFTRGVYYPDKVFRSSVLHSTQDLFLPFFSNVTWFHAIHVSGTNGTKRFDNPVLPFNDGVYFASTEKSNIIRGWIFGTTLDSKTQSLLIVNNATNVVIKVCEFQFCNDPFLGVYYHKNNKSWMESEFRVYSSANNCTFEYVSQPFLMDLEGKQGNFKNLREFVFKNIDGYFKIYSKHTPINLVRDLPQGFSALEPLVDLPIGINITRFQTLLALHRSYLTPGDSSSGWTAGAAAYYVGYLQPRTFLLKYNENGTITDAVDCALDPLSETKCTLKSFTVEKGIYQTSNFRVQPTESIVRFPNITNLCPFGEVFNATRFASVYAWNRKRISNCVADYSVLYNSASFSTFKCYGVSPTKLNDLCFTNVYADSFVIRGDEVRQIAPGQTGKIADYNYKLPDDFTGCVIAWNSNNLDSKVGGNYNYLYRLFRKSNLKPFERDISTEIYQAGSTPCNGVEGFNCYFPLQSYGFQPTNGVGYQPYRVVVLSFELLHAPATVCGPKKSTNLVKNKCVNFNFNGLTGTGVLTESNKKFLPFQQFGRDIADTTDAVRDPQTLEILDITPCSFGGVSVITPGTNTSNQVAVLYQDVNCTEVPVAIHADQLTPTWRVYSTGSNVFQTRAGCLIGAEHVNNSYECDIPIGAGICASYQTQTNSPRRARSVASQSIIAYTMSLGAENSVAYSNNSIAIPTNFTISVTTEILPVSMTKTSVDCTMYICGDSTECSNLLLQYGSFCTQLNRALTGIAVEQDKNTQEVFAQVKQIYKTPPIKDFGGFNFSQILPDPSKPSKRSFIEDLLFNKVTLADAGFIKQYGDCLGDIAARDLICAQKFNGLTVLPPLLTDEMIAQYTSALLAGTITSGWTFGAGAALQIPFAMQMAYRFNGIGVTQNVLYENQKLIANQFNSAIGKIQDSLSSTASALGKLQDVVNQNAQALNTLVKQLSSNFGAISSVLNDILSRLDKVEAEVQIDRLITGRLQSLQTYVTQQLIRAAEIRASANLAATKMSECVLGQSKRVDFCGKGYHLMSFPQSAPHGVVFLHVTYVPAQEKNFTTAPAICHDGKAHFPREGVFVSNGTHWFVTQRNFYEPQIITTDNTFVSGNCDVVIGIVNNTVYDPLQPELDSFKEELDKYFKNHTSPDVDLGDISGINASVVNIQKEIDRLNEVAKNLNESLIDLQELGKYEQYIKWPWYIWLGFIAGLIAIVMVTIMLCCMTSCCSCLKGCCSCGSCCKFDEDDSEPVLKGVKLHYT

SEQ ID NO: 2 - protein, 1273 aa, synthetic construct
  REGION 1..1273: note = Recombinant Sequence
MFVFLVLLPLVSSQCVNLTTRTQLPPAYTNSFTRGVYYPDKVFRSSVLHSTQDLFLPFFSNVTWFHAIHVSGTNGTKRFDNPVLPFNDGVYFASTEKSNIIRGWIFGTTLDSKTQSLLIVNNATNVVIKVCEFQFCNDPFLGVYYHKNNKSWMESEFRVYSSANNCTFEYVSQPFLMDLEGKQGNFKNLREFVFKNIDGYFKIYSKHTPINLVRDLPQGFSALEPLVDLPIGINITRFQTLLALHRSYLTPGDSSSGWTAGAAAYYVGYLQPRTFLLKYNENGTITDAVDCALDPLSETKCTLKSFTVEKGIYQTSNFRVQPTESIVRFPNITNLCPFGEVFNATRFASVYAWNRKRISNCVADYSVLYNSASFSTFKCYGVSPTKLNDLCFTNVYADSFVIRGDEVRQIAPGQTGKIADYNYKLPDDFTGCVIAWNSNNLDSKVGGNYNYLYRLFRKSNLKPFERDISTEIYQAGSTPCNGVEGFNCYFPLQSYGFQPTNGVGYQPYRVVVLSFELLHAPATVCGPKKSTNLVKNKCVNFNFNGLTGTGVLTESNKKFLPFQQFGRDIADTTDAVRDPQTLEILDITPCSFGGVSVITPGTNTSNQVAVLYQDVNCTEVPVAIHADQLTPTWRVYSTGSNVFQTRAGCLIGAEHVNNSYECDIPIGAGICASYQTQTNSPRRARSVASQSIIAYTMSLGAENSVAYSNNSIAIPTNFTISVTTEILPVSMTKTSVDCTMYICGDSTECSNLLLQYGSFCTQLNRALTGIAVEQDKNTQEVFAQVKQIYKTPPIKDFGGFNFSQILPDPSKPSKRSPIEDLLFNKVTLADAGFIKQYGDCLGDIAARDLICAQKFNGLTVLPPLLTDEMIAQYTSALLAGTITSGWTFGAGPALQIPFPMQMAYRFNGIGVTQNVLYENQKLIANQFNSAIGKIQDSLSSTPSALGKLQDVVNQNAQALNTLVKQLSSNFGAISSVLNDILSRLDPPEAEVQIDRLITGRLQSLQTYVTQQLIRAAEIRASANLAATKMSECVLGQSKRVDFCGKGYHLMSFPQSAPHGVVFLHVTYVPAQEKNFTTAPAICHDGKAHFPREGVFVSNGTHWFVTQRNFYEPQIITTDNTFVSGNCDVVIGIVNNTVYDPLQPELDSFKEELDKYFKNHTSPDVDLGDISGINASVVNIQKEIDRLNEVAKNLNESLIDLQELGKYEQYIKWPWYIWLGFIAGLIAIVMVTIMLCCMTSCCSCLKGCCSCGSCCKFDEDDSEPVLKGVKLHYT

SEQ ID NO: 3 - protein, 1273 aa, synthetic construct
  REGION 1..1273: note = Recombinant Sequence
MFVFLVLLPLVSSQCVNLTTRTQLPPAYTNSFTRGVYYPDKVFRSSVLHSTQDLFLPFFSNVTWFHAIHVSGTNGTKRFDNPVLPFNDGVYFASTEKSNIIRGWIFGTTLDSKTQSLLIVNNATNVVIKVCEFQFCNDPFLGVYYHKNNKSWMESEFRVYSSANNCTFEYVSQPFLMDLEGKQGNFKNLREFVFKNIDGYFKIYSKHTPINLVRDLPQGFSALEPLVDLPIGINITRFQTLLALHRSYLTPGDSSSGWTAGAAAYYVGYLQPRTFLLKYNENGTITDAVDCALDPLSETKCTLKSFTVEKGIYQTSNFRVQPTESIVRFPNITNLCPFGEVFNATRFASVYAWNRKRISNCVADYSVLYNSASFSTFKCYGVSPTKLNDLCFTNVYADSFVIRGDEVRQIAPGQTGKIADYNYKLPDDFTGCVIAWNSNNLDSKVGGNYNYLYRLFRKSNLKPFERDISTEIYQAGSTPCNGVEGFNCYFPLQSYGFQPTNGVGYQPYRVVVLSFELLHAPATVCGPKKSTNLVKNKCVNFNFNGLTGTGVLTESNKKFLPFQQFGRDIADTTDAVRDPQTLEILDITPCSFGGVSVITPGTNTSNQVAVLYQDVNCTEVPVAIHADQLTPTWRVYSTGSNVFQTRAGCLIGAEHVNNSYECDIPIGAGICASYQTQTNSPGSASSVASQSIIAYTMSLGAENSVAYSNNSIAIPTNFTISVTTEILPVSMTKTSVDCTMYICGDSTECSNLLLQYGSFCTQLNRALTGIAVEQDKNTQEVFAQVKQIYKTPPIKDFGGFNFSQILPDPSKPSKRSPIEDLLFNKVTLADAGFIKQYGDCLGDIAARDLICAQKFNGLTVLPPLLTDEMIAQYTSALLAGTITSGWTFGAGPALQIPFPMQMAYRFNGIGVTQNVLYENQKLIANQFNSAIGKIQDSLSSTPSALGKLQDVVNQNAQALNTLVKQLSSNFGAISSVLNDILSRLDPPEAEVQIDRLITGRLQSLQTYVTQQLIRAAEIRASANLAATKMSECVLGQSKRVDFCGKGYHLMSFPQSAPHGVVFLHVTYVPAQEKNFTTAPAICHDGKAHFPREGVFVSNGTHWFVTQRNFYEPQIITTDNTFVSGNCDVVIGIVNNTVYDPLQPELDSFKEELDKYFKNHTSPDVDLGDISGINASVVNIQKEIDRLNEVAKNLNESLIDLQELGKYEQYIKWPWYIWLGFIAGLIAIVMVTIMLCCMTSCCSCLKGCCSCGSCCKFDEDDSEPVLKGVKLHYT

SEQ ID NO: 4 - protein, 12 aa, synthetic construct
  REGION 1..12: note = Recombinant Sequence
GSGSGSGSGSGS

SEQ ID NO: 5 - protein, 16 aa, synthetic construct
  REGION 1..16: note = Recombinant Sequence
GSGSGSGSGSGSGSGS

SEQ ID NO: 6 - protein, 24 aa, synthetic construct
  REGION 1..24: note = Recombinant Sequence
GSGSGSGSGSGSGSGSGSGSGSGS

SEQ ID NO: 7 - protein, 32 aa, synthetic construct
  REGION 1..32: note = Recombinant Sequence
GSGSGSGSGSGSGSGSGSGSGSGSGSGSGSGS

SEQ ID NO: 8 - skipped

SEQ ID NO: 9 - protein, 226 aa, synthetic construct
  REGION 1..226: note = Recombinant Sequence
MENTTSGFLGPLLVLQAGFFLLTRILTIPQSLDSWWTSLNFLGGAPTCPGQNSRSPTSNHSPTSCPPICPGYRWMCLRRFIIFLFILLLCLIFLLVLLDYQGMLPVCPLLPGTSTTSTGPCKTCTNPANGTSMFPSCCCTKPSDGNCTCIPIPSSWAFARFLWEWASVRFSWLSFLVPFVQWFVGLSPTVWLSVMWMMWYWGPSLYNILSPFLPLLPIFFCLWVYI

SEQ ID NO: 10 - protein, 1448 aa, synthetic construct
  REGION 1..1448: note = Recombinant Sequence
MFVFLVLLPLVSSQCVNLTTRTQLPPAYTNSFTRGVYYPDKVFRSSVLHSTQDLFLPFFSNVTWFHAIHVSGTNGTKRFDNPVLPFNDGVYFASTEKSNIIRGWIFGTTLDSKTQSLLIVNNATNVVIKVCEFQFCNDPFLGVYYHKNNKSWMESEFRVYSSANNCTFEYVSQPFLMDLEGKQGNFKNLREFVFKNIDGYFKIYSKHTPINLVRDLPQGFSALEPLVDLPIGINITRFQTLLALHRSYLTPGDSSSGWTAGAAAYYVGYLQPRTFLLKYNENGTITDAVDCALDPLSETKCTLKSFTVEKGIYQTSNFRVQPTESIVRFPNITNLCPFGEVFNATRFASVYAWNRKRISNCVADYSVLYNSASFSTFKCYGVSPTKLNDLCFTNVYADSFVIRGDEVRQIAPGQTGKIADYNYKLPDDFTGCVIAWNSNNLDSKVGGNYNYLYRLFRKSNLKPFERDISTEIYQAGSTPCNGVEGFNCYFPLQSYGFQPTNGVGYQPYRVVVLSFELLHAPATVCGPKKSTNLVKNKCVNFNFNGLTGTGVLTESNKKFLPFQQFGRDIADTTDAVRDPQTLEILDITPCSFGGVSVITPGTNTSNQVAVLYQDVNCTEVPVAIHADQLTPTWRVYSTGSNVFQTRAGCLIGAEHVNNSYECDIPIGAGICASYQTQTNSPGSASSVASQSIIAYTMSLGAENSVAYSNNSIAIPTNFTISVTTEILPVSMTKTSVDCTMYICGDSTECSNLLLQYGSFCTQLNRALTGIAVEQDKNTQEVFAQVKQIYKTPPIKDFGGFNFSQILPDPSKPSKRSPIEDLLFNKVTLADAGFIKQYGDCLGDIAARDLICAQKFNGLTVLPPLLTDEMIAQYTSALLAGTITSGWTFGAGPALQIPFPMQMAYRFNGIGVTQNVLYENQKLIANQFNSAIGKIQDSLSSTPSALGKLQDVVNQNAQALNTLVKQLSSNFGAISSVLNDILSRLDPPEAEVQIDRLITGRLQSLQTYVTQQLIRAAEIRASANLAATKMSECVLGQSKRVDFCGKGYHLMSFPQSAPHGVVFLHVTYVPAQEKNFTTAPAICHDGKAHFPREGVFVSNGTHWFVTQRNFYEPQIITTDNTFVSGNCDVVIGIVNNTVYDPLQPELDSFKEELDKYFKNHTSPDVDLGDISGINASVVNIQKEIDRLNEVAKNLNESLIDLQELGKYGSGSGSGSGSGSGSGSMENTTSGFLGPLLVLQAGFFLLTRILTIPQSLDSWWTSLNFLGGAPTCPGQNSRSPTSNHSPTSCPPICPGYRWMCLRRFIIFLFILLLCLIFLLVLLDYQGMLPVCPLLPGTSTTSTGPCKTCTNPANGTSMFPSCCCTKPSDGNCTCIPIPSSWAFARFLWEWASVRFSWLSFLVPFVQWFVGLSPTVWLSVMWMMWYWGPSLYNILSPFLPLLPIFFCLWVYI

SEQ ID NO: 11 - protein, 1456 aa, synthetic construct
  REGION 1..1456: note = Recombinant Sequence
MFVFLVLLPLVSSQCVNLTTRTQLPPAYTNSFTRGVYYPDKVFRSSVLHSTQDLFLPFFSNVTWFHAIHVSGTNGTKRFDNPVLPFNDGVYFASTEKSNIIRGWIFGTTLDSKTQSLLIVNNATNVVIKVCEFQFCNDPFLGVYYHKNNKSWMESEFRVYSSANNCTFEYVSQPFLMDLEGKQGNFKNLREFVFKNIDGYFKIYSKHTPINLVRDLPQGFSALEPLVDLPIGINITRFQTLLALHRSYLTPGDSSSGWTAGAAAYYVGYLQPRTFLLKYNENGTITDAVDCALDPLSETKCTLKSFTVEKGIYQTSNFRVQPTESIVRFPNITNLCPFGEVFNATRFASVYAWNRKRISNCVADYSVLYNSASFSTFKCYGVSPTKLNDLCFTNVYADSFVIRGDEVRQIAPGQTGKIADYNYKLPDDFTGCVIAWNSNNLDSKVGGNYNYLYRLFRKSNLKPFERDISTEIYQAGSTPCNGVEGFNCYFPLQSYGFQPTNGVGYQPYRVVVLSFELLHAPATVCGPKKSTNLVKNKCVNFNFNGLTGTGVLTESNKKFLPFQQFGRDIADTTDAVRDPQTLEILDITPCSFGGVSVITPGTNTSNQVAVLYQDVNCTEVPVAIHADQLTPTWRVYSTGSNVFQTRAGCLIGAEHVNNSYECDIPIGAGICASYQTQTNSPGSASSVASQSIIAYTMSLGAENSVAYSNNSIAIPTNFTISVTTEILPVSMTKTSVDCTMYICGDSTECSNLLLQYGSFCTQLNRALTGIAVEQDKNTQEVFAQVKQIYKTPPIKDFGGFNFSQILPDPSKPSKRSPIEDLLFNKVTLADAGFIKQYGDCLGDIAARDLICAQKFNGLTVLPPLLTDEMIAQYTSALLAGTITSGWTFGAGPALQIPFPMQMAYRFNGIGVTQNVLYENQKLIANQFNSAIGKIQDSLSSTPSALGKLQDVVNQNAQALNTLVKQLSSNFGAISSVLNDILSRLDPPEAEVQIDRLITGRLQSLQTYVTQQLIRAAEIRASANLAATKMSECVLGQSKRVDFCGKGYHLMSFPQSAPHGVVFLHVTYVPAQEKNFTTAPAICHDGKAHFPREGVFVSNGTHWFVTQRNFYEPQIITTDNTFVSGNCDVVIGIVNNTVYDPLQPELDSFKEELDKYFKNHTSPDVDLGDISGINASVVNIQKEIDRLNEVAKNLNESLIDLQELGKYGSGSGSGSGSGSGSGSGSGSGSGSMENTTSGFLGPLLVLQAGFFLLTRILTIPQSLDSWWTSLNFLGGAPTCPGQNSRSPTSNHSPTSCPPICPGYRWMCLRRFIIFLFILLLCLIFLLVLLDYQGMLPVCPLLPGTSTTSTGPCKTCTNPANGTSMFPSCCCTKPSDGNCTCIPIPSSWAFARFLWEWASVRFSWLSFLVPFVQWFVGLSPTVWLSVMWMMWYWGPSLYNILSPFLPLLPIFFCLWVYI

SEQ ID NO: 12 - protein, 1464 aa, synthetic construct
  REGION 1..1464: note = Recombinant Sequence
MFVFLVLLPLVSSQCVNLTTRTQLPPAYTNSFTRGVYYPDKVFRSSVLHSTQDLFLPFFSNVTWFHAIHVSGTNGTKRFDNPVLPFNDGVYFASTEKSNIIRGWIFGTTLDSKTQSLLIVNNATNVVIKVCEFQFCNDPFLGVYYHKNNKSWMESEFRVYSSANNCTFEYVSQPFLMDLEGKQGNFKNLREFVFKNIDGYFKIYSKHTPINLVRDLPQGFSALEPLVDLPIGINITRFQTLLALHRSYLTPGDSSSGWTAGAAAYYVGYLQPRTFLLKYNENGTITDAVDCALDPLSETKCTLKSFTVEKGIYQTSNFRVQPTESIVRFPNITNLCPFGEVFNATRFASVYAWNRKRISNCVADYSVLYNSASFSTFKCYGVSPTKLNDLCFTNVYADSFVIRGDEVRQIAPGQTGKIADYNYKLPDDFTGCVIAWNSNNLDSKVGGNYNYLYRLFRKSNLKPFERDISTEIYQAGSTPCNGVEGFNCYFPLQSYGFQPTNGVGYQPYRVVVLSFELLHAPATVCGPKKSTNLVKNKCVNFNFNGLTGTGVLTESNKKFLPFQQFGRDIADTTDAVRDPQTLEILDITPCSFGGVSVITPGTNTSNQVAVLYQDVNCTEVPVAIHADQLTPTWRVYSTGSNVFQTRAGCLIGAEHVNNSYECDIPIGAGICASYQTQTNSPGSASSVASQSIIAYTMSLGAENSVAYSNNSIAIPTNFTISVTTEILPVSMTKTSVDCTMYICGDSTECSNLLLQYGSFCTQLNRALTGIAVEQDKNTQEVFAQVKQIYKTPPIKDFGGFNFSQILPDPSKPSKRSPIEDLLFNKVTLADAGFIKQYGDCLGDIAARDLICAQKFNGLTVLPPLLTDEMIAQYTSALLAGTITSGWTFGAGPALQIPFPMQMAYRFNGIGVTQNVLYENQKLIANQFNSAIGKIQDSLSSTPSALGKLQDVVNQNAQALNTLVKQLSSNFGAISSVLNDILSRLDPPEAEVQIDRLITGRLQSLQTYVTQQLIRAAEIRASANLAATKMSECVLGQSKRVDFCGKGYHLMSFPQSAPHGVVFLHVTYVPAQEKNFTTAPAICHDGKAHFPREGVFVSNGTHWFVTQRNFYEPQIITTDNTFVSGNCDVVIGIVNNTVYDPLQPELDSFKEELDKYFKNHTSPDVDLGDISGINASVVNIQKEIDRLNEVAKNLNESLIDLQELGKYGSGSGSGSGSGSGSGSGSGSGSGSGSGSGSGSMENTTSGFLGPLLVLQAGFFLLTRILTIPQSLDSWWTSLNFLGGAPTCPGQNSRSPTSNHSPTSCPPICPGYRWMCLRRFIIFLFILLLCLIFLLVLLDYQGMLPVCPLLPGTSTTSTGPCKTCTNPANGTSMFPSCCCTKPSDGNCTCIPIPSSWAFARFLWEWASVRFSWLSFLVPFVQWFVGLSPTVWLSVMWMMWYWGPSLYNILSPFLPLLPIFFCLWVYI

SEQ ID NO: 13 - DNA, 4347 bp, synthetic construct
  misc_feature 1..4347: note = Recombinant Sequence
  source 1..4347: mol_type = other DNA
atgttcgtgtttctggtgctgctgcccctggtgagctcccagtgcgtgaacctgaccacaaggacccagctgccccctgcctataccaattcctttacaaggggcgtgtactatccagacaaggtgttccgctctagcgtgctgcactctacacaggatctgttcctgcccttctttagcaacgtgacctggtttcacgccatccacgtgagcggcaccaatggcacaaagcggtttgacaatcctgtgctgccattcaacgatggcgtgtactttgcctccaccgagaagtctaacatcatcagaggctggatcttcggcaccacactggacagcaagacacagtccctgctgatcgtgaacaatgccaccaacgtggtcatcaaggtgtgcgagttccagttttgcaatgatccctttctgggcgtgtactatcacaagaacaataagtcttggatggagagcgagttccgcgtgtattcctctgccaacaattgcacattcgagtacgtgagccagccttttctgatggacctggagggcaagcagggcaacttcaagaacctgagggagttcgtgtttaagaatatcgatggctatttcaagatctactctaagcacaccccaatcaacctggtgcgcgacctgccacagggctttagcgccctggagcccctggtggatctgcctatcggcatcaacatcacccggttccagacactgctggccctgcacagaagctacctgacacccggcgacagctcctctggatggaccgcaggagcagcagcctactatgtgggctatctgcagcctcggacctttctgctgaagtacaacgagaatggcaccatcacagacgccgtggattgtgccctggaccccctgagcgagaccaagtgcacactgaagtccttcaccgtggagaagggcatctatcagacatccaacttccgggtgcagccaaccgagtctatcgtgcgcttcccaaatatcacaaacctgtgcccctttggcgaggtgttcaacgccaccagattcgccagcgtgtacgcctggaataggaagcgcatctctaactgcgtggccgactatagcgtgctgtacaactccgcctctttcagcacctttaagtgttatggcgtgtcccccacaaagctgaatgatctgtgcttcaccaacgtgtacgccgattcttttgtgatcaggggcgacgaggtgcgccagatcgcaccaggacagacaggcaagatcgccgactacaattataagctgcccgacgatttcaccggctgcgtgatcgcctggaactccaacaatctggattctaaagtgggcggcaactacaattatctgtaccggctgttcagaaagtccaatctgaagccttttgagagggacatctctacagagatctaccaggccggcagcaccccatgtaatggcgtggagggctttaactgctatttccctctgcagagctacggctttcagccaaccaacggcgtgggctatcagccctaccgcgtggtggtgctgagcttcgagctgctgcacgcacctgcaaccgtgtgcggaccaaagaagtccaccaatctggtgaagaacaagtgcgtgaacttcaacttcaacggactgaccggaacaggcgtgctgaccgagtccaacaagaagttcctgccatttcagcagttcggccgggacatcgccgataccacagacgccgtgagagaccctcagaccctggagatcctggatatcacaccatgtagcttcggcggcgtgtccgtgatcacaccaggaaccaatacaagcaaccaggtggccgtgctgtatcaggacgtgaattgcaccgaggtgccagtggcaatccacgcagatcagctgacccctacatggagggtgtactccaccggctctaacgtgttccagacaagggcaggatgcctgatcggagcagagcacgtgaacaattcctatgagtgtgacatcccaatcggagcaggaatctgcgcatcttaccagacccagacaaacagccctggctccgccagctccgtggcatcccagtctatcatcgcctataccatgagcctgggcgccgagaattccgtggcctactctaacaatagcatcgccatccccaccaactttacaatctccgtgaccacagagatcctgcccgtgagcatgaccaagacaagcgtggactgtacaatgtatatctgcggcgattccaccgagtgttctaacctgctgctgcagtacggcagcttctgcacccagctgaatagggccctgacaggaatcgcagtggagcaggacaagaacacacaggaggtgtttgcccaggtgaagcagatctacaagaccccacccatcaaggacttcggcggcttcaacttcagccagatcctgcctgatccatccaagccatctaagcggagccccatcgaggacctgctgttcaacaaggtgaccctggccgatgccggctttatcaagcagtatggcgattgtctgggcgacatcgccgccagagacctgatctgcgcccagaagtttaatggcctgaccgtgctgcctccactgctgacagatgagatgatcgcacagtacacaagcgccctgctggcaggaaccatcacatccggatggaccttcggcgcaggacctgccctgcagatccccttccctatgcagatggcctatcggttcaacggcatcggcgtgacccagaatgtgctgtacgagaaccagaagctgatcgccaatcagtttaactccgccatcggcaagatccaggactctctgtctagcacaccaagcgccctgggcaagctgcaggatgtggtgaatcagaacgcccaggccctgaataccctggtgaagcagctgtcctctaacttcggcgccatcagctccgtgctgaatgatatcctgagccggctggacccccctgaggcagaggtgcagatcgaccggctgatcacaggcagactgcagtctctgcagacctacgtgacacagcagctgatcagggcagcagagatcagggcaagcgccaatctggcagcaaccaagatgtccgagtgcgtgctgggccagtctaagagagtggacttctgcggcaagggctatcacctgatgagctttcctcagtccgccccacacggagtggtgttcctgcacgtgacctacgtgccagcccaggagaagaacttcaccacagcccccgccatctgtcacgatggcaaggcacacttcccaagggagggcgtgtttgtgagcaacggcacccactggttcgtgacacagagaaacttctacgagccccagatcatcaccacagacaatacattcgtgtccggcaactgcgacgtggtcatcggcatcgtgaacaataccgtgtatgatcccctgcagcctgagctggacagcttcaaggaggagctggataagtactttaagaatcacacctcccctgacgtggatctgggcgacatctccggcatcaatgcctctgtggtgaacatccagaaggagatcgacaggctgaacgaggtggccaagaatctgaacgagtctctgatcgatctgcaggagctgggcaagtacggcagcggctccggctctggcagcggctccggctctggcagcggctccatggagaataccacatccggctttctgggacctctgctggtgctgcaggcaggcttctttctgctgacccgcatcctgacaatcccacagtccctggattcttggtggacaagcctgaacttcctgggaggagcaccaacctgtccaggacagaattctaggagccccaccagcaaccactcccctacatcttgtccacccatctgcccaggatataggtggatgtgcctgcggcggttcatcatcttcctgtttatcctgctgctgtgcctgatcttcctgctggtgctgctggactaccagggcatgctgcccgtgtgcccactgctgccaggcaccagcaccacatccacaggaccttgtaagacctgcacaaatccagccaacggcacctctatgtttcccagctgctgttgcacaaagccttccgatggcaattgtacctgcatcccaatcccctctagctgggcctttgcccggttcctgtgggagtgggcctctgtgagattctcttggctgagctttctggtgcctttcgtgcagtggtttgtgggcctgtccccaaccgtgtggctgtctgtgatgtggatgatgtggtattggggccccagcctgtacaacatcctgtcccctttcctgccactgctgcccatcttcttttgcctgtgggtgtacatctga

SEQ ID NO: 14 - DNA, 4371 bp, synthetic construct
  misc_feature 1..4371: note = Recombinant Sequence
  source 1..4371: mol_type = other DNA
atgttcgtgtttctggtgctgctgcccctggtgagctcccagtgcgtgaacctgaccacaaggacccagctgccccctgcctataccaatagctttacaaggggcgtgtactatccagacaaggtgttccgctctagcgtgctgcacagcacacaggatctgttcctgcccttcttttccaacgtgacctggtttcacgccatccacgtgtccggcaccaatggcacaaagcggtttgacaatcctgtgctgccattcaacgatggcgtgtactttgcctctaccgagaagagcaacatcatcagaggctggatcttcggcaccacactggactccaagacacagtctctgctgatcgtgaacaatgccaccaacgtggtcatcaaggtgtgcgagttccagttttgcaatgatccctttctgggcgtgtactatcacaagaacaataagagctggatggagtccgagttccgcgtgtattcctctgccaacaattgcacattcgagtacgtgagccagccttttctgatggacctggagggcaagcagggcaacttcaagaacctgagggagttcgtgtttaagaatatcgatggctatttcaagatctacagcaagcacaccccaatcaacctggtgcgcgacctgccacagggcttttccgccctggagcccctggtggatctgcctatcggcatcaacatcacccggttccagacactgctggccctgcacagatcctacctgacacccggcgacagctcctctggatggaccgcaggagcagcagcctactatgtgggctatctgcagcctcggacctttctgctgaagtacaacgagaatggcaccatcacagacgccgtggattgtgccctggaccccctgtccgagaccaagtgcacactgaagtctttcaccgtggagaagggcatctatcagacatctaacttccgggtgcagccaaccgagagcatcgtgcgcttcccaaatatcacaaacctgtgcccctttggcgaggtgttcaacgccaccagattcgccagcgtgtacgcctggaataggaagcgcatcagcaactgcgtggccgactattccgtgctgtacaactccgcctctttcagcacctttaagtgttatggcgtgtctcccacaaagctgaatgatctgtgcttcaccaacgtgtacgccgatagctttgtgatcaggggcgacgaggtgcgccagatcgcaccaggacagacaggcaagatcgccgactacaattataagctgcccgacgatttcaccggctgcgtgatcgcctggaactctaacaatctggatagcaaagtgggcggcaactacaattatctgtaccggctgttcagaaagagcaatctgaagccttttgagagggacatcagcacagagatctaccaggccggctccaccccatgtaatggcgtggagggctttaactgctatttccctctgcagtcctacggctttcagccaaccaacggcgtgggctatcagccctaccgcgtggtggtgctgtccttcgagctgctgcacgcacctgcaaccgtgtgcggaccaaagaagtctaccaatctggtgaagaacaagtgcgtgaacttcaacttcaacggactgaccggaacaggcgtgctgaccgagagcaacaagaagttcctgccatttcagcagttcggccgggacatcgccgataccacagacgccgtgagagaccctcagaccctggagatcctggatatcacaccatgttccttcggcggcgtgtctgtgatcacacccggcaccaatacatccaaccaggtggccgtgctgtatcaggacgtgaattgcaccgaggtgccagtggcaatccacgcagatcagctgacccctacatggagggtgtactctaccggcagcaacgtgttccagacaagggcaggatgcctgatcggagcagagcacgtgaacaattcttatgagtgtgacatcccaatcggagcaggaatctgcgcaagctaccagacccagacaaactcccctggctctgccagctccgtggcatcccagtctatcatcgcctataccatgtccctgggcgccgagaattctgtggcctacagcaacaattccatcgccatccccaccaactttacaatcagcgtgaccacagagatcctgcctgtgagcatgaccaagacatccgtggactgtacaatgtatatctgcggcgattctaccgagtgtagcaacctgctgctgcagtacggctccttctgcacccagctgaatagggccctgacaggaatcgcagtggagcaggacaagaacacacaggaggtgtttgcccaggtgaagcagatctacaagaccccacccatcaaggacttcggcggcttcaacttcagccagatcctgcctgatccatctaagccaagcaagcggtcccccatcgaggacctgctgttcaacaaggtgaccctggccgatgccggctttatcaagcagtatggcgattgtctgggcgacatcgccgccagagacctgatctgcgcccagaagtttaatggcctgaccgtgctgcctccactgctgacagatgagatgatcgcacagtacacatccgccctgctggcaggcaccatcacatctggatggaccttcggcgcaggacctgccctgcagatccccttccctatgcagatggcctatcggttcaacggcatcggcgtgacccagaatgtgctgtacgagaaccagaagctgatcgccaatcagtttaacagcgccatcggcaagatccaggacagcctgtctagcacaccatccgccctgggcaagctgcaggatgtggtgaatcagaacgcccaggccctgaataccctggtgaagcagctgtcctctaacttcggcgccatcagctccgtgctgaatgatatcctgtcccggctggacccccctgaggcagaggtgcagatcgaccggctgatcacaggcagactgcagagcctgcagacctacgtgacacagcagctgatcagggcagcagagatcagggcatccgccaatctggcagcaaccaagatgtctgagtgcgtgctgggccagagcaagagagtggacttctgcggcaagggctatcacctgatgtcctttcctcagtctgccccacacggcgtggtgttcctgcacgtgacctacgtgccagcccaggagaagaacttcaccacagcccccgccatctgtcacgatggcaaggcacacttcccaagggagggcgtgttcgtgagcaacggcacccactggttcgtgacacagagaaacttctacgagccccagatcatcaccacagacaatacattcgtgtctggcaactgcgacgtggtcatcggcatcgtgaacaataccgtgtatgatcccctgcagcctgagctggactccttcaaggaggagctggataagtactttaagaatcacacctctcccgacgtggatctgggcgacatctctggcatcaatgccagcgtggtgaacatccagaaggagatcgacaggctgaacgaggtggccaagaatctgaacgagagcctgatcgatctgcaggagctgggcaagtacggcagcggctccggctctggcagcggctccggctctggcagcggctccggctctggcagcggctccggctctatggagaataccacaagcggctttctgggacctctgctggtgctgcaggcaggcttctttctgctgacccgcatcctgacaatcccacagtctctggatagctggtggacatccctgaacttcctgggaggagcaccaacctgtccaggacagaatagcaggtcccccacctccaaccactctcctacaagctgtccacccatctgccctggctatcgctggatgtgcctgcggcggttcatcatcttcctgtttatcctgctgctgtgcctgatcttcctgctggtgctgctggactaccagggcatgctgcccgtgtgcccactgctgccaggcacctccaccacatctacaggcccttgtaagacctgcacaaatccagccaacggcaccagcatgtttccctcctgctgttgcacaaagccttctgatggcaattgtacctgcatcccaatcccctctagctgggcctttgcccggttcctgtgggagtgggcaagcgtgagattcagctggctgtcctttctggtgcctttcgtgcagtggtttgtgggcctgtctccaaccgtgtggctgagcgtgatgtggatgatgtggtattggggcccctccctgtacaacatcctgtctcctttcctgccactgctgcccatcttcttttgcctgtgggtgtacatctga

SEQ ID NO: 15 - DNA, 4395 bp, synthetic construct
  misc_feature 1..4395: note = Recombinant Sequence
  source 1..4395: mol_type = other DNA
atgttcgtgtttctggtgctgctgccccttgtgagctcccagtgtgtgaacctgaccacaaggacccagctgccccctgcctataccaatagctttacaaggggcgtgtactatccagacaaggtgttccgctctagcgtgctgcactccacacaggatctgttcctgcccttcttttctaacgtgacctggtttcacgccatccacgtgtccggcaccaatggcacaaagcggtttgacaatcctgtgctgccattcaacgatggcgtgtactttgccagcaccgagaagtccaacatcatcagaggctggatcttcggcaccacactggactctaagacacagagcctgctgatcgtgaacaatgccaccaacgtggtgatcaaagtgtgtgagttccagttttgcaatgatccctttctgggcgtgtactatcacaagaacaataagtcctggatggagtctgagttccgcgtgtattcctctgccaacaattgcacattcgagtacgtgagccagccttttctgatggacctggagggcaagcagggcaattttaagaacctgagggagttcgtgtttaagaatatcgatggctatttcaagatctactccaagcacaccccaatcaacctggtgcgcgacctgccccagggcttttctgccctggagcccctggtggatctgcctatcggcatcaacatcacccggttccagacactgctggccctgcacagaagctacctgacacccggcgacagctcctctggatggaccgcaggagcagcagcctactatgtgggctatctgcagcctaggacctttctgctgaagtacaacgagaatggcaccatcacagacgccgtggattgtgccctggaccccctgtctgagaccaagtgcacactgaagagcttcaccgtggagaagggcatctatcagacaagcaattttagggtgcagccaaccgagtccatcgtgcgcttcccaaatatcacaaacctgtgtccctttggcgaggtgttcaacgcaaccaggttcgcaagcgtgtacgcatggaataggaagcgcatctccaactgcgtggccgactattctgtgctgtacaactccgcctctttcagcacctttaagtgttatggcgtgagccccacaaagctgaatgatctgtgcttcaccaacgtgtacgccgattcctttgtgatcaggggagacgaagtgaggcagatcgcaccaggacagacaggcaagatcgccgactacaattataagctgcccgacgatttcaccggctgcgtgatcgcctggaacagcaacaatctggattccaaagtgggcggcaactacaattatctgtaccggctgttcagaaagagcaatctgaagccttttgagagggacatctccacagagatctaccaggccggctctaccccatgtaatggcgtggagggctttaactgctatttccctctgcagtcctacggctttcagccaaccaacggcgtgggctatcagccctaccgcgtggtggtgctgtctttcgagctgctgcacgcacctgcaacagtgtgtggaccaaagaagagcaccaatctggtgaagaacaagtgcgtgaacttcaattttaacggactgaccggaacaggagtgctgaccgagagcaacaagaagttcctgccatttcagcagttcggccgggacatcgccgataccacagacgccgtgagagaccctcagaccctggagatcctggatatcacaccatgttctttcggaggagtgagcgtgatcacaccaggaaccaatacatccaaccaggtggccgtgctgtatcaggacgtgaattgcaccgaggtgccagtggcaatccacgcagatcagctgacccctacatggagggtgtacagcaccggctccaacgtgttccagacaagggcaggatgcctgatcggagcagagcacgtgaacaatagctatgagtgtgacatcccaatcggagcaggaatctgcgcatcctaccagacccagacaaactctcctggcagcgcaagctccgtggcatcccagtctatcatcgcctataccatgtctctgggcgccgagaatagcgtggcctactccaacaattctatcgccatccccaccaactttacaatcagcgtgaccacagagatcctgcctgtgtccatgaccaagacatctgtggactgtacaatgtatatctgcggcgatagcaccgagtgttccaacctgctgctgcagtacggctccttctgcacccagctgaatagggcactgacaggaatcgcagtggagcaggacaagaacacacaggaggtgtttgcccaggtgaagcagatctacaagaccccacccatcaaggacttcggcggcttcaattttagccagatcctgcctgatccaagcaagccatccaagcggtctcccatcgaggacctgctgttcaacaaggtgaccctggccgatgccggctttatcaagcagtatggcgattgtctgggcgacatcgccgccagagacctgatctgcgcccagaagtttaatggcctgaccgtgctgcctccactgctgacagatgagatgatcgcccagtacacatctgcactgctggcaggaaccatcacaagcggatggaccttcggagcaggacctgcactgcagatccccttccctatgcagatggcctatagatttaacggcatcggcgtgacccagaatgtgctgtacgagaaccagaagctgatcgccaatcagtttaacagcgccatcggcaagatccaggactccctgtctagcacaccatctgccctgggcaagctgcaggatgtggtgaatcagaacgcccaggccctgaataccctggtgaagcagctgtcctctaacttcggcgccatcagctccgtgctgaatgatatcctgtcccggctggacccccctgaggcagaggtgcagatcgaccggctgatcacaggcagactgcagtccctgcagacctacgtgacacagcagctgatcagggcagcagagatcagggcatctgcaaatctggccgccaccaagatgagcgagtgtgtgctgggccagtccaagagagtggacttctgcggcaagggctatcacctgatgtcttttcctcagagcgcaccacacggagtggtgttcctgcacgtgacctacgtgccagcccaggagaagaacttcaccacagcccccgccatctgtcacgatggaaaggcacacttcccaagggagggagtgtttgtgtctaacggcacccactggttcgtgacacagagaaatttttatgagccccagatcatcaccacagacaatacattcgtgtccggcaactgcgatgtggtgatcggcatcgtgaacaataccgtgtatgatcccctgcagcctgagctggactctttcaaggaggagctggataagtactttaagaatcacaccagccccgacgtggatctgggcgacatcagcggcatcaatgcctccgtggtgaacatccagaaggagatcgaccggctgaacgaggtggccaagaatctgaacgagagcctgatcgatctgcaggagctgggaaagtacggcagcggctccggctctggcagcggctccggctctggcagcggctccggctctggcagcggctccggctctggcagcggctccggctctggcagcatggagaataccacaagcggctttctgggacctctgctggtgctgcaggcaggcttctttctgctgaccagaatcctgacaatcccacagagcctggattcctggtggacatccctgaacttcctgggaggagcaccaacctgtccaggacagaattccaggtctcccacctctaaccacagccctacatcctgtccacccatctgccctggctatcgctggatgtgtctgcggagatttatcatcttcctgtttatcctgctgctgtgcctgatcttcctgctggtgctgctggactaccagggcatgctgcctgtgtgcccactgctgccaggaacctctaccacaagcacaggcccttgtaagacctgcacaaatccagccaacggcacctccatgtttccctcttgctgttgcacaaagcctagcgatggcaattgtacctgcatcccaatcccctctagctgggcctttgcacggttcctgtgggagtgggcatccgtgagattctcctggctgtcttttctggtgcctttcgtgcagtggtttgtgggcctgagcccaaccgtgtggctgtccgtgatgtggatgatgtggtattggggcccctctctgtacaacatcctgagccctttcctgccactgctgcccatcttcttttgcctgtgggtgtacatctga

SEQ ID NO: 16 - protein, 1273 aa, synthetic construct
  REGION 1..1273: note = Recombinant Sequence
MFVFLVLLPLVSSQCVNLTTRTQLPPAYTNSFTRGVYYPDKVFRSSVLHSTQDLFLPFFSNVTWFHAIHVSGTNGTKRFDNPVLPFNDGVYFASIEKSNIIRGWIFGTTLDSKTQSLLIVNNATNVVIKVCEFQFCNDPFLGTSNHKNNKSWMESEFRVYSSANNCTFEYVSQPFLMDLEGKQGNFKNLREFVFKNIDGYFKIYSKHTPINLVRDLPQGFSALEPLVDLPIGINITRFQTLLALHRSYLTPGDSSSGWTAGAAAYYVGYLQPRTFLLKYNENGTITDAVDCALDPLSETKCTLKSFTVEKGIYQTSNFRVQPTESIVRFPNITNLCPFGEVFNATKFASVYAWNRKRISNCVADYSVLYNSASFSTFKCYGVSPTKLNDLCFTNVYADSFVIRGDEVRQIAPGQTGKIADYNYKLPDDFTGCVIAWNSNNLDSKVGGNYNYLYRLFRKSNLKPFERDISTEIYQAGSTPCNGVKGFNCYFPLQSYGFQPTYGVGYQPYRVVVLSFELLHAPATVCGPKKSTNLVKNKCVNFNFNGLTGTGVLTESNKKFLPFQQFGRDIADTTDAVRDPQTLEILDITPCSFGGVSVITPGTNTSNQVAVLYQGVNCTEVPVAIHADQLTPTWRVYSTGSNVFQTRAGCLIGAEHVNNSYECDIPIGAGICASYQTQTNSHGSASSVASQSIIAYTMSLGAENSVAYSNNSIAIPTNFTISVTTEILPVSMTKTSVDCTMYICGDSTECSNLLLQYGSFCTQLNRALTGIAVEQDKNTQEVFAQVKQIYKTPPIKDFGGFNFSQILPDPSKPSKRSPIEDLLFNKVTLADAGFIKQYGDCLGDIAARDLICAQKFNGLTVLPPLLTDEMIAQYTSALLAGTITSGWTFGAGPALQIPFPMQMAYRFNGIGVTQNVLYENQKLIANQFNSAIGKIQDSLSSTPSALGKLQNVVNQNAQALNTLVKQLSSNFGAISSVLNDILSRLDPPEAEVQIDRLITGRLQSLQTYVTQQLIRAAEIRASANLAATKMSECVLGQSKRVDFCGKGYHLMSFPQSAPHGVVFLHVTYVPAQEKNFTTAPAICHDGKAHFPREGVFVSNGTHWFVTQRNFYEPQIITTDNTFVSGNCDVVIGIVNNTVYDPLQPELDSFKEELDKYFKNHTSPDVDLGDISGINASVVNIQKEIDRLNEVAKNLNESLIDLQELGKYEQYIKWPWYIWLGFIAGLIAIVMVTIMLCCMTSCCSCLKGCCSCGSCCKFDEDDSEPVLKGVKLHYT

SEQ ID NO: 17 - protein, 1448 aa, synthetic construct
  REGION 1..1448: note = Recombinant Sequence
MFVFLVLLPLVSSQCVNLTTRTQLPPAYTNSFTRGVYYPDKVFRSSVLHSTQDLFLPFFSNVTWFHAIHVSGTNGTKRFDNPVLPFNDGVYFASIEKSNIIRGWIFGTTLDSKTQSLLIVNNATNVVIKVCEFQFCNDPFLGTSNHKNNKSWMESEFRVYSSANNCTFEYVSQPFLMDLEGKQGNFKNLREFVFKNIDGYFKIYSKHTPINLVRDLPQGFSALEPLVDLPIGINITRFQTLLALHRSYLTPGDSSSGWTAGAAAYYVGYLQPRTFLLKYNENGTITDAVDCALDPLSETKCTLKSFTVEKGIYQTSNFRVQPTESIVRFPNITNLCPFGEVFNATKFASVYAWNRKRISNCVADYSVLYNSASFSTFKCYGVSPTKLNDLCFTNVYADSFVIRGDEVRQIAPGQTGKIADYNYKLPDDFTGCVIAWNSNNLDSKVGGNYNYLYRLFRKSNLKPFERDISTEIYQAGSTPCNGVKGFNCYFPLQSYGFQPTYGVGYQPYRVVVLSFELLHAPATVCGPKKSTNLVKNKCVNFNFNGLTGTGVLTESNKKFLPFQQFGRDIADTTDAVRDPQTLEILDITPCSFGGVSVITPGTNTSNQVAVLYQGVNCTEVPVAIHADQLTPTWRVYSTGSNVFQTRAGCLIGAEHVNNSYECDIPIGAGICASYQTQTNSHGSASSVASQSIIAYTMSLGAENSVAYSNNSIAIPTNFTISVTTEILPVSMTKTSVDCTMYICGDSTECSNLLLQYGSFCTQLNRALTGIAVEQDKNTQEVFAQVKQIYKTPPIKDFGGFNFSQILPDPSKPSKRSPIEDLLFNKVTLADAGFIKQYGDCLGDIAARDLICAQKFNGLTVLPPLLTDEMIAQYTSALLAGTITSGWTFGAGPALQIPFPMQMAYRFNGIGVTQNVLYENQKLIANQFNSAIGKIQDSLSSTPSALGKLQNVVNQNAQALNTLVKQLSSNFGAISSVLNDILSRLDPPEAEVQIDRLITGRLQSLQTYVTQQLIRAAEIRASANLAATKMSECVLGQSKRVDFCGKGYHLMSFPQSAPHGVVFLHVTYVPAQEKNFTTAPAICHDGKAHFPREGVFVSNGTHWFVTQRNFYEPQIITTDNTFVSGNCDVVIGIVNNTVYDPLQPELDSFKEELDKYFKNHTSPDVDLGDISGINASVVNIQKEIDRLNEVAKNLNESLIDLQELGKYGSGSGSGSGSGSGSGSMENTTSGFLGPLLVLQAGFFLLTRILTIPQSLDSWWTSLNFLGGAPTCPGQNSRSPTSNHSPTSCPPICPGYRWMCLRRFIIFLFILLLCLIFLLVLLDYQGMLPVCPLLPGTSTTSTGPCKTCTNPANGTSMFPSCCCTKPSDGNCTCIPIPSSWAFARFLWEWASVRFSWLSFLVPFVQWFVGLSPTVWLSVMWMMWYWGPSLYNILSPFLPLLPIFFCLWVYI

SEQ ID NO: 18 - protein, 1456 aa, synthetic construct
  REGION 1..1456: note = Recombinant Sequence
MFVFLVLLPLVSSQCVNLTTRTQLPPAYTNSFTRGVYYPDKVFRSSVLHSTQDLFLPFFSNVTWFHAIHVSGTNGTKRFDNPVLPFNDGVYFASIEKSNIIRGWIFGTTLDSKTQSLLIVNNATNVVIKVCEFQFCNDPFLGTSNHKNNKSWMESEFRVYSSANNCTFEYVSQPFLMDLEGKQGNFKNLREFVFKNIDGYFKIYSKHTPINLVRDLPQGFSALEPLVDLPIGINITRFQTLLALHRSYLTPGDSSSGWTAGAAAYYVGYLQPRTFLLKYNENGTITDAVDCALDPLSETKCTLKSFTVEKGIYQTSNFRVQPTESIVRFPNITNLCPFGEVFNATKFASVYAWNRKRISNCVADYSVLYNSASFSTFKCYGVSPTKLNDLCFTNVYADSFVIRGDEVRQIAPGQTGKIADYNYKLPDDFTGCVIAWNSNNLDSKVGGNYNYLYRLFRKSNLKPFERDISTEIYQAGSTPCNGVKGFNCYFPLQSYGFQPTYGVGYQPYRVVVLSFELLHAPATVCGPKKSTNLVKNKCVNFNFNGLTGTGVLTESNKKFLPFQQFGRDIADTTDAVRDPQTLEILDITPCSFGGVSVITPGTNTSNQVAVLYQGVNCTEVPVAIHADQLTPTWRVYSTGSNVFQTRAGCLIGAEHVNNSYECDIPIGAGICASYQTQTNSHGSASSVASQSIIAYTMSLGAENSVAYSNNSIAIPTNFTISVTTEILPVSMTKTSVDCTMYICGDSTECSNLLLQYGSFCTQLNRALTGIAVEQDKNTQEVFAQVKQIYKTPPIKDFGGFNFSQILPDPSKPSKRSPIEDLLFNKVTLADAGFIKQYGDCLGDIAARDLICAQKFNGLTVLPPLLTDEMIAQYTSALLAGTITSGWTFGAGPALQIPFPMQMAYRFNGIGVTQNVLYENQKLIANQFNSAIGKIQDSLSSTPSALGKLQNVVNQNAQALNTLVKQLSSNFGAISSVLNDILSRLDPPEAEVQIDRLITGRLQSLQTYVTQQLIRAAEIRASANLAATKMSECVLGQSKRVDFCGKGYHLMSFPQSAPHGVVFLHVTYVPAQEKNFTTAPAICHDGKAHFPREGVFVSNGTHWFVTQRNFYEPQIITTDNTFVSGNCDVVIGIVNNTVYDPLQPELDSFKEELDKYFKNHTSPDVDLGDISGINASVVNIQKEIDRLNEVAKNLNESLIDLQELGKYGSGSGSGSGSGSGSGSGSGSGSGSMENTTSGFLGPLLVLQAGFFLLTRILTIPQSLDSWWTSLNFLGGAPTCPGQNSRSPTSNHSPTSCPPICPGYRWMCLRRFIIFLFILLLCLIFLLVLLDYQGMLPVCPLLPGTSTTSTGPCKTCTNPANGTSMFPSCCCTKPSDGNCTCIPIPSSWAFARFLWEWASVRFSWLSFLVPFVQWFVGLSPTVWLSVMWMMWYWGPSLYNILSPFLPLLPIFFCLWVYI

SEQ ID NO: 19 - protein, 1271 aa, synthetic construct
  REGION 1..1271: note = Recombinant Sequence
MFVFLVLLPLVSSQCVNLRTRTQLPPAYTNSFTRGVYYPDKVFRSSVLHSTQDLFLPFFSNVTWFHAIHVSGTNGTKRFDNPVLPFNDGVYFASTEKSNIIRGWIFGTTLDSKTQSLLIVNNATNVVIKVCEFQFCNDPFLDVYYHKNNKSWMESGVYSSANNCTFEYVSQPFLMDLEGKQGNFKNLREFVFKNIDGYFKIYSKHTPINLVRDLPQGFSALEPLVDLPIGINITRFQTLLALHRSYLTPGDSSSGWTAGAAAYYVGYLQPRTFLLKYNENGTITDAVDCALDPLSETKCTLKSFTVEKGIYQTSNFRVQPTESIVRFPNITNLCPFGEVFNATRFASVYAWNRKRISNCVADYSVLYNSASFSTFKCYGVSPTKLNDLCFTNVYADSFVIRGDEVRQIAPGQTGKIADYNYKLPDDFTGCVIAWNSNNLDSKVGGNYNYRYRLFRKSNLKPFERDISTEIYQAGSKPCNGVEGFNCYFPLQSYGFQPTNGVGYQPYRVVVLSFELLHAPATVCGPKKSTNLVKNKCVNFNFNGLTGTGVLTESNKKFLPFQQFGRDIADTTDAVRDPQTLEILDITPCSFGGVSVITPGTNTSNQVAVLYQGVNCTEVPVAIHADQLTPTWRVYSTGSNVFQTRAGCLIGAEHVNNSYECDIPIGAGICASYQTQTNSRGSASSVASQSIIAYTMSLGAENSVAYSNNSIAIPTNFTISVTTEILPVSMTKTSVDCTMYICGDSTECSNLLLQYGSFCTQLNRALTGIAVEQDKNTQEVFAQVKQIYKTPPIKDFGGFNFSQILPDPSKPSKRSPIEDLLFNKVTLADAGFIKQYGDCLGDIAARDLICAQKFNGLTVLPPLLTDEMIAQYTSALLAGTITSGWTFGAGPALQIPFPMQMAYRFNGIGVTQNVLYENQKLIANQFNSAIGKIQDSLSSTPSALGKLQNVVNQNAQALNTLVKQLSSNFGAISSVLNDILSRLDPPEAEVQIDRLITGRLQSLQTYVTQQLIRAAEIRASANLAATKMSECVLGQSKRVDFCGKGYHLMSFPQSAPHGVVFLHVTYVPAQEKNFTTAPAICHDGKAHFPREGVFVSNGTHWFVTQRNFYEPQIITTDNTFVSGNCDVVIGIVNNTVYDPLQPELDSFKEELDKYFKNHTSPDVDLGDISGINASVVNIQKEIDRLNEVAKNLNESLIDLQELGKYEQYIKWPWYIWLGFIAGLIAIVMVTIMLCCMTSCCSCLKGCCSCGSCCKFDEDDSEPVLKGVKLHYT

SEQ ID NO: 20 - protein, 1271 aa, synthetic construct
  REGION 1..1271: note = Recombinant Sequence
MFVFLVLLPLVSSQCVNLRTRTQLPPAYTNSFTRGVYYPDKVFRSSVLHSTQDLFLPFFSNVTWFHAIHFSGTNGTKRFDNPVLPFNDGVYFASIEKSNIIRGWIFGTTLDSKTQSLLIVNNATNVVIKVCEFQFCNDPFLDVYYHKNNKSWMESGVYSSANNCTFEYVSQPFLMDLEGKQGNFKNLREFVFKNIDGYFKIYSKHTPINLVRDLPQGFSVLEPLVDLPIGINITRFQTLLALHRSYLTPGDSSSGLTAGAAAYYVGYLQPRTFLLKYNENGTITDAVDCALDPLSETKCTLKSFTVEKGIYQTSNFRVQPTESIVRFPNITNLCPFGEVFNATRFASVYAWNRKRISNCVADYSVLYNSASFSTFKCYGVSPTKLNDLCFTNVYADSFVIRGDEVRQIAPGQTGNIADYNYKLPDDFTGCVIAWNSNNLDSKVGGNYNYRYRLFRKSNLKPFERDISTEIYQAGSKPCNGVEGFNCYFPLQSYGFQPTNGVGYQPYRVVVLSFELLHAPATVCGPKKSTNLVKNKCVNFNFNGLTGTGVLTESNKKFLPFQQFGRDIADTTDAVRDPQTLEILDITPCSFGGVSVITPGTNTSNQVAVLYQGVNCTEVPVAIHADQLTPTWRVYSTGSNVFQTRAGCLIGAEHVNNSYECDIPIGAGICASYQTQTNSRGSASSVASQSIIAYTMSLGAENSVAYSNNSIAIPTNFTISVTTEILPVSMTKTSVDCTMYICGDSTECSNLLLQYGSFCTQLNRALTGIAVEQDKNTQEVFAQVKQIYKTPPIKDFGGFNFSQILPDPSKPSKRSPIEDLLFNKVTLADAGFIKQYGDCLGDIAARDLICAQKFNGLTVLPPLLTDEMIAQYTSALLAGTITSGWTFGAGPALQIPFPMQMAYRFNGIGVTQNVLYENQKLIANQFNSAIGKIQDSLSSTPSALGKLQNVVNQNAQALNTLVKQLSSNFGAISSVLNDILSRLDPPEAEVQIDRLITGRLQSLQTYVTQQLIRAAEIRASANLAATKMSECVLGQSKRVDFCGKGYHLMSFPQSAPHGVVFLHVTYVPAQEKNFTTAPAICHDGKAHFPREGVFVSNGTHWFVTQRNFYEPQIITTDNTFVSGNCDVVIGIVNNTVYDPLQPELDSFKEELDKYFKNHTSPDVDLGDISGINASVVNIQKEIDRLNEVAKNLNESLIDLQELGKYEQYIKWPWYIWLGFIAGLIAIVMVTIMLCCMTSCCSCLKGCCSCGSCCKFDEDDSEPVLKGVKLHYT

SEQ ID NO: 21 - protein, 1270 aa, synthetic construct
  REGION 1..1270: note = Recombinant Sequence
MFVFLVLLPLVSSQCVNLTTRTQLPPAYTNSFTRGVYYPDKVFRSSVLHSTQDLFLPFFSNVTWFHAISGTNGTKRFDNPVLPFNDGVYFASTEKSNIIRGWIFGTTLDSKTQSLLIVNNATNVVIKVCEFQFCNDPFLGVYHKNNKSWMESEFRVYSSANNCTFEYVSQPFLMDLEGKQGNFKNLREFVFKNIDGYFKIYSKHTPINLVRDLPQGFSALEPLVDLPIGINITRFQTLLALHRSYLTPGDSSSGWTAGAAAYYVGYLQPRTFLLKYNENGTITDAVDCALDPLSETKCTLKSFTVEKGIYQTSNFRVQPTESIVRFPNITNLCPFGEVFNATRFASVYAWNRKRISNCVADYSVLYNSASFSTFKCYGVSPTKLNDLCFTNVYADSFVIRGDEVRQIAPGQTGKIADYNYKLPDDFTGCVIAWNSNNLDSKVGGNYNYLYRLFRKSNLKPFERDISTEIYQAGSTPCNGVEGFNCYFPLQSYGFQPTYGVGYQPYRVVVLSFELLHAPATVCGPKKSTNLVKNKCVNFNFNGLTGTGVLTESNKKFLPFQQFGRDIDDTTDAVRDPQTLEILDITPCSFGGVSVITPGTNTSNQVAVLYQGVNCTEVPVAIHADQLTPTWRVYSTGSNVFQTRAGCLIGAEHVNNSYECDIPIGAGICASYQTQTNSHGSASSVASQSIIAYTMSLGAENSVAYSNNSIAIPINFTISVTTEILPVSMTKTSVDCTMYICGDSTECSNLLLQYGSFCTQLNRALTGIAVEQDKNTQEVFAQVKQIYKTPPIKDFGGFNFSQILPDPSKPSKRSPIEDLLFNKVTLADAGFIKQYGDCLGDIAARDLICAQKFNGLTVLPPLLTDEMIAQYTSALLAGTITSGWTFGAGPALQIPFPMQMAYRFNGIGVTQNVLYENQKLIANQFNSAIGKIQDSLSSTPSALGKLQDVVNQNAQALNTLVKQLSSNFGAISSVLNDILARLDPPEAEVQIDRLITGRLQSLQTYVTQQLIRAAEIRASANLAATKMSECVLGQSKRVDFCGKGYHLMSFPQSAPHGVVFLHVTYVPAQEKNFTTAPAICHDGKAHFPREGVFVSNGTHWFVTQRNFYEPQIITTHNTFVSGNCDVVIGIVNNTVYDPLQPELDSFKEELDKYFKNHTSPDVDLGDISGINASVVNIQKEIDRLNEVAKNLNESLIDLQELGKYEQYIKWPWYIWLGFIAGLIAIVMVTIMLCCMTSCCSCLKGCCSCGSCCKFDEDDSEPVLKGVKLHYT

SEQ ID NO: 22 - protein, 1270 aa, synthetic construct
  REGION 1..1270: note = Recombinant Sequence
MFVFLVLLPLVSSQCVNLTTRTQLPPAYTNSFTRGVYYPDKVFRSSVLHSTQDLFLPFFSNVTWFHAISGTNGTKRFDNPVLPFNDGVYFASTEKSNIIRGWIFGTTLDSKTQSLLIVNNATNVVIKVCEFQFCNDPFLGVYHKNNKSWMESEFRVYSSANNCTFEYVSQPFLMDLEGKQGNFKNLREFVFKNIDGYFKIYSKHTPINLVRDLPQGFSALEPLVDLPIGINITRFQTLLALHRSYLTPGDSSSGWTAGAAAYYVGYLQPRTFLLKYNENGTITDAVDCALDPLSETKCTLKSFTVEKGIYQTSNFRVQPTESIVRFPNITNLCPFGEVFNATRFASVYAWNRKRISNCVADYSVLYNSASFSTFKCYGVSPTKLNDLCFTNVYADSFVIRGDEVRQIAPGQTGKIADYNYKLPDDFTGCVIAWNSNNLDSKVGGNYNYLYRLFRKSNLKPFERDISTEIYQAGSTPCNGVKGFNCYFPLQPYGFQPTYGVGYQPYRVVVLSFELLHAPATVCGPKKSTNLVKNKCVNFNFNGLTGTGVLTESNKKFLPFQQFGRDIDDTTDAVRDPQTLEILDITPCSFGGVSVITPGTNTSNQVAVLYQGVNCTEVPVAIHADQLTPTWRVYSTGSNVFQTRAGCLIGAEHVNNSYECDIPIGAGICASYQTQTNSHGSASSVASQSIIAYTMSLGAENSVAYSNNSIAIPINFTISVTTEILPVSMTKTSVDCTMYICGDSTECSNLLLQYGSFCTQLNRALTGIAVEQDKNTQEVFAQVKQIYKTPPIKDFGGFNFSQILPDPSKPSKRSPIEDLLFNKVTLADAGFIKQYGDCLGDIAARDLICAQKFNGLTVLPPLLTDEMIAQYTSALLAGTITSGWTFGAGPALQIPFPMQMAYRFNGIGVTQNVLYENQKLIANQFNSAIGKIQDSLSSTPSALGKLQDVVNQNAQALNTLVKQLSSNFGAISSVLNDILARLDPPEAEVQIDRLITGRLQSLQTYVTQQLIRAAEIRASANLAATKMSECVLGQSKRVDFCGKGYHLMSFPQSAPHGVVFLHVTYVPAQEKNFTTAPAICHDGKAHFPREGVFVSNGTHWFVTQRNFYEPQIITTHNTFVSGNCDVVIGIVNNTVYDPLQPELDSFKEELDKYFKNHTSPDVDLGDISGINASVVNIQKEIDRLNEVANNLNESLIDLQELGKYEQYIKWPWYIWLGFIAGLIAIVMVTIMLCCMTSCCSCLKGCCSCGSCCKFDEDDSEPVLKGVKLHYT

SEQ ID NO: 23 - protein, 1270 aa, synthetic construct
  REGION 1..1270: note = Recombinant Sequence
MFVFLVLLPLVSSQCVNFTTRTQLPPAYTNSFTRGVYYPDKVFRSSVLHSTQDLFLPFFSNVTWFHAIHVSGTNGTKRFANPVLPFNDGVYFASTEKSNIIRGWIFGTTLDSKTQSLLIVNNATNVVIKVCEFQFCNDPFLGVYYHKNNKSWMESEFRVYSSANNCTFEYVSQPFLMDLEGKQGNFKNLREFVFKNIDGYFKIYSKHTPINLVRGLPQGFSALEPLVDLPIGINITRFQTLHRSYLTPGDSSSGWTAGAAAYYVGYLQPRTFLLKYNENGTITDAVDCALDPLSETKCTLKSFTVEKGIYQTSNFRVQPTESIVRFPNITNLCPFGEVFNATRFASVYAWNRKRISNCVADYSVLYNSASFSTFKCYGVSPTKLNDLCFTNVYADSFVIRGDEVRQIAPGQTGNIADYNYKLPDDFTGCVIAWNSNNLDSKVGGNYNYLYRLFRKSNLKPFERDISTEIYQAGSTPCNGVKGFNCYFPLQSYGFQPTYGVGYQPYRVVVLSFELLHAPATVCGPKKSTNLVKNKCVNFNFNGLTGTGVLTESNKKFLPFQQFGRDIADTTDAVRDPQTLEILDITPCSFGGVSVITPGTNTSNQVAVLYQGVNCTEVPVAIHADQLTPTWRVYSTGSNVFQTRAGCLIGAEHVNNSYECDIPIGAGICASYQTQTNSPGSASSVASQSIIAYTMSLGVENSVAYSNNSIAIPTNFTISVTTEILPVSMTKTSVDCTMYICGDSTECSNLLLQYGSFCTQLNRALTGIAVEQDKNTQEVFAQVKQIYKTPPIKDFGGFNFSQILPDPSKPSKRSPIEDLLFNKVTLADAGFIKQYGDCLGDIAARDLICAQKFNGLTVLPPLLTDEMIAQYTSALLAGTITSGWTFGAGPALQIPFPMQMAYRFNGIGVTQNVLYENQKLIANQFNSAIGKIQDSLSSTPSALGKLQDVVNQNAQALNTLVKQLSSNFGAISSVLNDILSRLDPPEAEVQIDRLITGRLQSLQTYVTQQLIRAAEIRASANLAATKMSECVLGQSKRVDFCGKGYHLMSFPQSAPHGVVFLHVTYVPAQEKNFTTAPAICHDGKAHFPREGVFVSNGTHWFVTQRNFYEPQIITTDNTFVSGNCDVVIGIVNNTVYDPLQPELDSFKEELDKYFKNHTSPDVDLGDISGINASVVNIQKEIDRLNEVAKNLNESLIDLQELGKYEQYIKWPWYIWLGFIAGLIAIVMVTIMLCCMTSCCSCLKGCCSCGSCCKFDEDDSEPVLKGVKLHYT

SEQ ID NO: 24 - protein, 1273 aa, synthetic construct
  REGION 1..1273: note = Recombinant Sequence
MFVFLVLLPLVSSQCVNFTNRTQLPSAYTNSFTRGVYYPDKVFRSSVLHSTQDLFLPFFSNVTWFHAIHVSGTNGTKRFDNPVLPFNDGVYFASTEKSNIIRGWIFGTTLDSKTQSLLIVNNATNVVIKVCEFQFCNYPFLGVYYHKNNKSWMESEFRVYSSANNCTFEYVSQPFLMDLEGKQGNFKNLSEFVFKNIDGYFKIYSKHTPINLVRDLPQGFSALEPLVDLPIGINITRFQTLLALHRSYLTPGDSSSGWTAGAAAYYVGYLQPRTFLLKYNENGTITDAVDCALDPLSETKCTLKSFTVEKGIYQTSNFRVQPTESIVRFPNITNLCPFGEVFNATRFASVYAWNRKRISNCVADYSVLYNSASFSTFKCYGVSPTKLNDLCFTNVYADSFVIRGDEVRQIAPGQTGTIADYNYKLPDDFTGCVIAWNSNNLDSKVGGNYNYLYRLFRKSNLKPFERDISTEIYQAGSTPCNGVKGFNCYFPLQSYGFQPTYGVGYQPYRVVVLSFELLHAPATVCGPKKSTNLVKNKCVNFNFNGLTGTGVLTESNKKFLPFQQFGRDIADTTDAVRDPQTLEILDITPCSFGGVSVITPGTNTSNQVAVLYQGVNCTEVPVAIHADQLTPTWRVYSTGSNVFQTRAGCLIGAEYVNNSYECDIPIGAGICASYQTQTNSPGSASSVASQSIIAYTMSLGAENSVAYSNNSIAIPTNFTISVTTEILPVSMTKTSVDCTMYICGDSTECSNLLLQYGSFCTQLNRALTGIAVEQDKNTQEVFAQVKQIYKTPPIKDFGGFNFSQILPDPSKPSKRSPIEDLLFNKVTLADAGFIKQYGDCLGDIAARDLICAQKFNGLTVLPPLLTDEMIAQYTSALLAGTITSGWTFGAGPALQIPFPMQMAYRFNGIGVTQNVLYENQKLIANQFNSAIGKIQDSLSSTPSALGKLQDVVNQNAQALNTLVKQLSSNFGAISSVLNDILSRLDPPEAEVQIDRLITGRLQSLQTYVTQQLIRAAEIRASANLAAIKMSECVLGQSKRVDFCGKGYHLMSFPQSAPHGVVFLHVTYVPAQEKNFTTAPAICHDGKAHFPREGVFVSNGTHWFVTQRNFYEPQIITTDNTFVSGNCDVVIGIVNNTVYDPLQPELDSFKEELDKYFKNHTSPDVDLGDISGINASFVNIQKEIDRLNEVAKNLNESLIDLQELGKYEQYIKWPWYIWLGFIAGLIAIVMVTIMLCCMTSCCSCLKGCCSCGSCCKFDEDDSEPVLKGVKLHYT

SEQ ID NO: 25 - protein, 1273 aa, synthetic construct
  REGION 1..1273: note = Recombinant Sequence
MFVFLVLLPLVSSQCVNLTTRTQLPPAYTNSFTRGVYYPDKVFRSSVLHSTQDLFLPFFSNVTWFHAIHVSGTNGTKRFDNPVLPFNDGVYFASIEKSNIIRGWIFGTTLDSKTQSLLIVNNATNVVIKVCEFQFCNDPFLDVYYHKNNKSWMKSEFRVYSSANNCTFEYVSQPFLMDLEGKQGNFKNLREFVFKNIDGYFKIYSKHTPINLVRDLPQGFSALEPLVDLPIGINITRFQTLLALHRSYLTPGDSSSGWTAGAAAYYVGYLQPRTFLLKYNENGTITDAVDCALDPLSETKCTLKSFTVEKGIYQTSNFRVQPTESIVRFPNITNLCPFGEVFNATRFASVYAWNRKRISNCVADYSVLYNSASFSTFKCYGVSPTKLNDLCFTNVYADSFVIRGDEVRQIAPGQTGKIADYNYKLPDDFTGCVIAWNSNNLDSKVGGNYNYRYRLFRKSNLKPFERDISTEIYQAGSTPCNGVQGFNCYFPLQSYGFQPTNGVGYQPYRVVVLSFELLHAPATVCGPKKSTNLVKNKCVNFNFNGLTGTGVLTESNKKFLPFQQFGRDIADTTDAVRDPQTLEILDITPCSFGGVSVITPGTNTSNQVAVLYQGVNCTEVPVAIHADQLTPTWRVYSTGSNVFQTRAGCLIGAEHVNNSYECDIPIGAGICASYQTQTNSRGSASSVASQSIIAYTMSLGAENSVAYSNNSIAIPTNFTISVTTEILPVSMTKTSVDCTMYICGDSTECSNLLLQYGSFCTQLNRALTGIAVEQDKNTQEVFAQVKQIYKTPPIKDFGGFNFSQILPDPSKPSKRSPIEDLLFNKVTLADAGFIKQYGDCLGDIAARDLICAQKFNGLTVLPPLLTDEMIAQYTSALLAGTITSGWTFGAGPALQIPFPMQMAYRFNGIGVTQNVLYENQKLIANQFNSAIGKIQDSLSSTPSALGKLQDVVNQNAQALNTLVKQLSSNFGAISSVLNDILSRLDPPEAEVQIDRLITGRLQSLQTYVTQQLIRAAEIRASANLAATKMSECVLGQSKRVDFCGKGYHLMSFPQSAPHGVVFLHVTYVPAHEKNFTTAPAICHDGKAHFPREGVFVSNGTHWFVTQRNFYEPQIITTDNTFVSGNCDVVIGIVNNTVYDPLQPELDSFKEELDKYFKNHTSPDVDLGDISGINASVVNIQKEIDRLNEVAKNLNESLIDLQELGKYEQYIKWPWYIWLGFIAGLIAIVMVTIMLCCMTSCCSCLKGCCSCGSCCKFDEDDSEPVLKGVKLHYT

SEQ ID NO: 26 - protein, 1266 aa, synthetic construct
  REGION 1..1266: note = Recombinant Sequence
MFVFLVLLPLVSSQCVNLTTRTQLPPAYTNSFTRGVYYPDKVFRSSVLHSTQDLFLPFFSNVTWFHAIHVSGTNVIKRFDNPVLPFNDGVYFASTEKSNIIRGWIFGTTLDSKTQSLLIVNNATNVVIKVCEFQFCNDPFLGVYYHKNNKSWMESEFRVYSSANNCTFEYVSQPFLMDLEGKQGNFKNLREFVFKNIDGYFKIYSKHTPINLVRDLPQGFSALEPLVDLPIGINITRFQTLLALHNSSSGWTAGAAAYYVGYLQPRTFLLKYNENGTITDAVDCALDPLSETKCTLKSFTVEKGIYQTSNFRVQPTESIVRFPNITNLCPFGEVFNATRFASVYAWNRKRISNCVADYSVLYNSASFSTFKCYGVSPTKLNDLCFTNVYADSFVIRGDEVRQIAPGQTGKIADYNYKLPDDFTGCVIAWNSNNLDSKVGGNYNYQYRLFRKSNLKPFERDISTEIYQAGSTPCNGVEGFNCYSPLQSYGFQPTNGVGYQPYRVVVLSFELLHAPATVCGPKKSTNLVKNKCVNFNFNGLTGTGVLTESNKKFLPFQQFGRDIADTTDAVRDPQTLEILDITPCSFGGVSVITPGTNTSNQVAVLYQGVNCTEVPVAIHADQLTPTWRVYSTGSNVFQTRAGCLIGAEHVNNSYECDIPIGAGICASYQTQTNSPGSASSVASQSIIAYTMSLGAENSVAYSNNSIAIPTNFTISVTTEILPVSMTKTSVDCTMYICGDSTECSNLLLQYGSFCTQLNRALTGIAVEQDKNTQEVFAQVKQIYKTPPIKDFGGFNFSQILPDPSKPSKRSPIEDLLFNKVTLADAGFIKQYGDCLGDIAARDLICAQKFNGLNVLPPLLTDEMIAQYTSALLAGTITSGWTFGAGPALQIPFPMQMAYRFNGIGVTQNVLYENQKLIANQFNSAIGKIQDSLSSTPSALGKLQDVVNQNAQALNTLVKQLSSNFGAISSVLNDILSRLDPPEAEVQIDRLITGRLQSLQTYVTQQLIRAAEIRASANLAATKMSECVLGQSKRVDFCGKGYHLMSFPQSAPHGVVFLHVTYVPAQEKNFTTAPAICHDGKAHFPREGVFVSNGTHWFVTQRNFYEPQIITTDNTFVSGNCDVVIGIVNNTVYDPLQPELDSFKEELDKYFKNHTSPDVDLGDISGINASVVNIQKEIDRLNEVAKNLNESLIDLQELGKYEQYIKWPWYIWLGFIAGLIAIVMVTIMLCCMTSCCSCLKGCCSCGSCCKFDEDDSEPVLKGVKLHYT

SEQ ID NO: 27 - protein, 1265 aa, synthetic construct
  REGION 1..1265: note = Recombinant Sequence
MFVFLVLLPLVSSQCVNLTTRTQLPPAYTNSFTRGVYYPDKVFRSSVLHSTQDLFLPFFSNVTWFHAIHVSGTNVIKRFDNPVLPFNDGVYFASTEKSNIIRGWIFGTTLDSKTQSLLIVNNATNVVIKVCEFQFCNDPFLGVYYHKNNKSWMESEFRVYSSANNCTFEYVSQPFLMDLEGKQGNFKNLREFVFKNIDGYFKIYSKHTPINLVRDLPQGFSALEPLVDLPIGINITRFQTLLALHSSSGWTAGAAAYYVGYLQPRTFLLKYNENGTITDAVDCALDPLSETKCTLKSFTVEKGIYQTSNFRVQPTESIVRFPNITNLCPFGEVFNATRFASVYAWNRKRISNCVADYSVLYNSASFSTFKCYGVSPTKLNDLCFTNVYADSFVIRGDEVRQIAPGQTGKIADYNYKLPDDFTGCVIAWNSNNLDSKVGGNYNYQYRLFRKSNLKPFERDISTEIYQAGSTPCNGVEGFNCYSPLQSYGFQPTNGVGYQPYRVVVLSFELLHAPATVCGPKKSTNLVKNKCVNFNFNGLTGTGVLTESNKKFLPFQQFGRDIADTTDAVRDPQTLEILDITPCSFGGVSVITPGTNTSNQVAVLYQGVNCTEVPVAIHADQLTPTWRVYSTGSNVFQTRAGCLIGAEHVNNSYECDIPIGAGICASYQTQTNSPGSASSVASQSIIAYTMSLGAENSVAYSNNSIAIPTNFTISVTTEILPVSMTKTSVDCTMYICGDSTECSNLLLQYGSFCTQLNRALTGIAVEQDKNTQEVFAQVKQIYKTPPIKDFGGFNFSQILPDPSKPSKRSPIEDLLFNKVTLADAGFIKQYGDCLGDIAARDLICAQKFNGLNVLPPLLTDEMIAQYTSALLAGTITSGWTFGAGPALQIPFPMQMAYRFNGIGVTQNVLYENQKLIANQFNSAIGKIQDSLSSTPSALGKLQDVVNQNAQALNTLVKQLSSNFGAISSVLNDILSRLDPPEAEVQIDRLITGRLQSLQTYVTQQLIRAAEIRASANLAATKMSECVLGQSKRVDFCGKGYHLMSFPQSAPHGVVFLHVTYVPAQEKNFTTAPAICHDGKAHFPREGVFVSNGTHWFVTQRNFYEPQIITTDNTFVSGNCDVVIGIVNNTVYDPLQPELDSFKEELDKYFKNHTSPDVDLGDISGINASVVNIQKEIDRLNEVAKNLNESLIDLQELGKYEQYIKWPWYIWLGFIAGLIAIVMVTIMLCCMTSCCSCLKGCCSCGSCCKFDEDDSEPVLKGVKLHYT

SEQ ID NO: 28 - protein, 1273 aa, synthetic construct
  REGION 1..1273: note = Recombinant Sequence
MFVFLVLLPLVSSQCVNLTTRTQLPPAYTNSFTRGVYYPDKVFRSSVLHSTQDLFLPFFSNVTWFHAIHVSGTNGTKRFDNPVLPFNDGVYFASTEKSNIIRGWIFGTTLDSKTQSLLIVNNATNVVIKVCEFQFCNDPFLGVYYHKNNKSLMESEFRVYSSANNCTFEYVSQPFLMDLEGKQGNFKNLREFVFKNIDGYFKIYSKHTPINLVRDLPQGFSALEPLVDLPIGINITRFQTLLALHRSYLTPGDSSSGWTAGAAAYYVGYLQPRTFLLKYNENGTITDAVDCALDPLSETKCTLKSFTVEKGIYQTSNFRVQPTESIVRFPNITNLCPFGEVFNATRFASVYAWNRKRISNCVADYSVLYNSASFSTFKCYGVSPTKLNDLCFTNVYADSFVIRGDEVRQIAPGQTGKIADYNYKLPDDFTGCVIAWNSNNLDSKVGGNYNYLYRLFRKSNLKPFERDISTEIYQAGSTPCNGVKGFNCYFPLQSYGFQPTNGVGYQPYRVVVLSFELLHAPATVCGPKKSTNLVKNKCVNFNFNGLTGTGVLTESNKKFLPFQQFGRDIADTTDAVRDPQTLEILDITPCSFGGVSVITPGTNTSNQVAVLYQGVNCTEVPVAIHADQLTPTWRVYSTGSNVFQTRAGCLIGAEHVNNSYECDIPIGAGICASYQTQTNSPGSASSVASQSIIAYTMSLGAENSVAYSNNSIAIPTNFTISVTTEILPVSMTKTSVDCTMYICGDSTECSNLLLQYGSFCTQLNRALTVIAVEQDKNTQEVFAQVKQIYKTPPIKDFGGFNFSQILPDPSKPSKRSPIEDLLFNKVTLADAGFIKQYGDCLGDIAARDLICAQKFNGLTVLPPLLTDEMIAQYTSALLAGTITSGWTFGAGPALQIPFPMQMAYRFNGIGVTQNVLYENQKLIANQFNSAIGKIQDSLSSTPSALGKLQDVVNQNAQALNTLVKQLSSNFGAISSVLNDILSRLDPPEAEVQIDRLITGRLQSLQTYVTQQLIRAAEIRASANLAATKMSECVLGQSKRVDFCGKGYHLMSFPQSAPHGVVFLHVTYVPAQEKNFTTAPAICHDGKAHFPREGVFVSNGTHWFVTQRNFYEPQIITTDNTFVSGNCDVVIGIVNNTVYDPLQPELDSFKEELDKYFKNHTSPDVDLGDISGINASVVNIQKEIDRLNEVAKNLNESLIDLQELGKYEQYIKWPWYIWLGFIAGLIAIVMVTIMLCCMTSCCSCLKGCCSCGSCCKFDEDDSEPVLKGVKLHYT

SEQ ID NO: 29 - protein, 1273 aa, synthetic construct
  REGION 1..1273: note = Recombinant Sequence
MFVFLVLLPLVSSQCVNLTTRTQLPPAYTNSFTRGVYYPDKVFRSSVLHSTQDLFLPFFSNVTWFHAIHVSGTNGTKRFDNPVLPFNDGVYFASTEKSNIIRGWIFGTTLDSKTQSLLIVNNATNVVIKVCEFQFCNDPFLGVYYHKNNKSWMESEFRVYSSANNCTFEYVSQPFLMDLEGKQGNFKNLREFVFKNIDGYFKIYSKHTPINLVRDLPQGFSALEPLVDLPIGINITRFQTLLALHRSYLTPGDSSSGWTAGAAAYYVGYLQPRTFLLKYNENGTITDAVDCALDPLSETKCTLKSFTVEKGIYQTSNFRVQPTESIVRFPNITNLCPFGEVFNATRFASVYAWNRKRISNCVADYSVLYNSASFSTFKCYGVSPTKLNDLCFTNVYADSFVIRGDEVRQIAPGQTGKIADYNYKLPDDFTGCVIAWNSNNLDSKVGGNYNYLYRLFRKSNLKPFERDISTEIYQAGSKPCNGVEGFNCYFPLQSYGFQPTNGVGYQPYRVVVLSFELLHAPATVCGPKKSTNLVKNKCVNFNFNGLTGTGVLTESNKKFLPFQQFGRDIADTTDAVRDPQTLEILDITPCSFGGVSVITPGTNTSNQVAVLYQGVNCTEVPVAIHADQLTPTWRVYSTGSNVFQTRAGCLIGAEHVNNSYECDIPIGAGICASYQTQTNSHGSASSVASQSIIAYTMSLGAENSVAYSNNSIAIPTNFTISVTTEILPVSMAKTSVDCTMYICGDSTECSNLLLQYGSFCTQLNRALTGIAVEQDKNTQEVFAQVKQIYKTPPIKDFGGFNFSQILPDPSKPSKRSPIEDLLFNKVTLADAGFIKQYGDCLGDIAARDLICAQKFNGLTVLPPLLTDEMIAQYTSALLAGTITSGWTFGAGPALQIPFPMQMAYRFNGIGVTQNVLYENQKLIANQFNSAIGKIQDSLSSTPSALGKLQDVVNQNAQALNTLVKQLSSNFGAISSVLNDILSRLDPPEAEVQIDRLITGRLQSLQTYVTQQLIRAAEIRASANLAATKMSECVLGQSKRVDFCGKGYHLMSFPQSAPHGVVFLHVTYVPAQEKNFTTAPAICHDGKAHFPREGVFVSNGTHWFVTQRNFYEPQIITTDNTFVSGNCDVVIGIVNNTVYDPLQPELDSFKEELDKYFKNHTSPDVDLGDISGINASVVNIQKEIDRLNEVAKNLNESLIDLQELGKYEQYIKWPWYIWLGFIAGLIAIVMVTIMLCCMTSCCSCLKGCCSCGSCCKFDEDDSEPVLKGVKLHYT

SEQ ID NO: 30 - protein, 1270 aa, synthetic construct
  REGION 1..1270: note = Recombinant Sequence
MFVFLVLLPLVSSQCVNLTTRTQLPPAYTNSFTRGVYYPDKVFRSSVLHSTRDLFLPFFSNVTWFHVISGTNGTKRFDNPVLPFNDGVYFASTEKSNIIRGWIFGTTLDSKTQSLLIVNNATNVVIKVCEFQFCNDPFLGVYHKNNKSWMESEFRVYSSANNCTFEYVSQPFLMDLEGKQGNFKNLREFVFKNIDGYFKIYSKHTPINLVRDLPQGFSALEPLVDLPIGINITRFQTLLALHRSYLTPGDSSSGWTAGAAAYYVGYLQPRTFLLKYNENGTITDAVDCALDPLSETKCTLKSFTVEKGIYQTSNFRVQPTESIVRFPNITNLCPFGEVFNATRFASVYAWNRKRISNCVADYSVLYNSASFSTFKCYGVSPTKLNDLCFTNVYADSFVIRGDEVRQIAPGQTGKIADYNYKLPDDFTGCVIAWNSNNLDSKVGGNYNYLYRLFRKSNLKPFERDISTEIYQAGSTPCNGVKGFNCYFPLQSYGFQPTNGVGYQPYRVVVLSFELLHAPATVCGPKKSTNLVKNKCVNFNFNGLTGTGVLTESNKKFLPFQQFGRDIADTTDAVRDPQTLEILDITPCSFGGVSVITPGTNTSNQVAVLYQGVNCTEVPVAIHADQLTPTWRVYSTGSNVFQTRAGCLIGAEHVNNSYECDIPIGAGICASYQTHTNSPGSASSVASQSIIAYTMSLGAENSVAYSNNSIAIPTNFTISVTTEILPVSMTKTSVDCTMYICGDSTECSNLLLQYGSFCTQLNRALTGIAVEQDKNTQEVFAQVKQIYKTPPIKDFGGFNFSQILPDPSKPSKRSPIEDLLFNKVTLADAGFIKQYGDCLGDIAARDLICAQKFNGLTVLPPLLTDEMIAQYTSALLAGTITSGWTLGAGPALQIPFPMQMAYRFNGIGVTQNVLYENQKLIANQFNSAIGKIQDSLSSTPSALGKLQDVVNQNAQALNTLVKQLSSNFGAISSVLNDILSRLDPPEAEVQIDRLITGRLQSLQTYVTQQLIRAAEIRASANLAATKMSECVLGQSKRVDFCGKGYHLMSFPQSAPHGVVFLHVTYVPAQEKNFTTAPAICHDGKAHFPREGVFVSNGTHWFVTQRNFYEPQIITTDNTFVSGNCDVVIGIVNNTVYDPLQPELDSFKEELDKYFKNHTSPDVDLGDISGINASVVNIQKEIDRLNEVAKNLNESLIDLQELGKYEQYIKWPWYIWLGFIAGLIAIVMVTIMLCCMTSCCSCLKGCCSCGSCCKFDEDDSEPVLKGVKLHYT

SEQ ID NO: 31 - protein, 1273 aa, synthetic construct
  REGION 1..1273: note = Recombinant Sequence
MFVFFVLLPLVSSQCVNLTTRTQLPPAYTNSFTRGVYYPDKVFRSSVLHSTQDLFLPFFSNVTWFHAIHVSGTNGTKRFDNPVLPFNDGVYFASIEKSNIIRGWIFGTTLDSKTQSLLIVNNATNVVIKVCEFQFCNDPFLGVYYHKNNKSWMESEFRVYSSANNCTFEYVSQPFLMDLEGKQGNFKNLREFVFKNIDGYFKIYSKHTPINLVRDLPQGFSALEPLVDLPIGINITRFQTLLALHRSYLTPGGSSSGWTAGAAAYYVGYLQPRTFLLKYNENGTITDAVDCALDPLSETKCTLKSFTVEKGIYQTSNFRVQPTESIVRFPNITNLCPFGEVFNATRFASVYAWNRKRISNCVADYSVLYNSASFSTFKCYGVSPTKLNDLCFTNVYADSFVIRGDEVRQIAPGQTGKIADYNYKLPDDFTGCVIAWNSNNLDSKVGGNYNYLYRLFRKSNLKPFERDISTEIYQAGSTPCNGVKGFNCYFPLQSYGFQPTNGVGYQPYRVVVLSFELLHAPATVCGPKKSTNLVKNKCVNFNFNGLTGTGVLTESNKKFLPFQQFGRDIADTTDAVRDPQTLEILDITPCSFGGVSVITPGTNTSNQVAVLYQGVNCTEVPVAIHADQLTPTWRVYSTGSNVFQTRAGCLIGAEHVNNSYECDIPIGAGICASYQTQTNSPGSASSVASQSIIAYTMSLGVENSVAYSNNSIAIPTNFTISVTTEILPVSMTKTSVDCTMYICGDSTECSNLLLQYGSFCTQLNRALTGIAVEQDKNTQEVFAQVKQIYKTPPIKDFGGFNFSQILPDPSKPSKRSPIEDLLFNKVTLADAGFIKQYGDCLGDIAARDLICAQKFNGLTVLPPLLTDEMIAQYTSALLAGTITSGWTFGAGPALQIPFPMQMAYRFNGIGVTQNVLYENQKLIANQFNSAIGKIQDSLSSTPSALGKLQDVVNQNAQALNTLVKQLSSNFGAISSVLNDILSRLDPPEAEVQIDRLITGRLQSLQTYVTQQLIRAAEIRASANLAATKMSECVLGQSKRVDFCGKGYHLMSFPQSAPHGVVFLHVTYVPAQEKNFTTAPAICHDGKAHFPREGVFVSNGTHWFVTQRNFYEPQIITTDNTFVSGNCDVVIGIVNNTVYDPLQPELDSFKEELDKYFKNHTSPDVDLGDISGINASVVNIQKEIDRLNEVAKNLNESLIDLQELGKYEQYIKWPWYIWLGFIAGLIAIVMVTIMLCCMTSCCSCLKGCCSCGSCCKFDEDDSEPVLKGVKLHYT

SEQ ID NO: 32 - protein, 1273 aa, synthetic construct
  REGION 1..1273: note = Recombinant Sequence
MFVFLVLLPLVSIQCVNLTTRTQLPPAYTNSFTRGVYYPDKVFRSSVLHSTQDLFLPFFSNVTWFHAIHVSGTNGTKRFDNPVLPFNDGVYFASTEKSNIIRGWIFGTTLDSKTQSLLIVNNATNVVIKVCEFQFCNDPFLGVYYHKNNKSCMESEFRVYSSANNCTFEYVSQPFLMDLEGKQGNFKNLREFVFKNIDGYFKIYSKHTPINLVRDLPQGFSALEPLVDLPIGINITRFQTLLALHRSYLTPGDSSSGWTAGAAAYYVGYLQPRTFLLKYNENGTITDAVDCALDPLSETKCTLKSFTVEKGIYQTSNFRVQPTESIVRFPNITNLCPFGEVFNATRFASVYAWNRKRISNCVADYSVLYNSASFSTFKCYGVSPTKLNDLCFTNVYADSFVIRGDEVRQIAPGQTGKIADYNYKLPDDFTGCVIAWNSNNLDSKVGGNYNYRYRLFRKSNLKPFERDISTEIYQAGSTPCNGVEGFNCYFPLQSYGFQPTNGVGYQPYRVVVLSFELLHAPATVCGPKKSTNLVKNKCVNFNFNGLTGTGVLTESNKKFLPFQQFGRDIADTTDAVRDPQTLEILDITPCSFGGVSVITPGTNTSNQVAVLYQGVNCTEVPVAIHADQLTPTWRVYSTGSNVFQTRAGCLIGAEHVNNSYECDIPIGAGICASYQTQTNSPGSASSVASQSIIAYTMSLGAENSVAYSNNSIAIPTNFTISVTTEILPVSMTKTSVDCTMYICGDSTECSNLLLQYGSFCTQLNRALTGIAVEQDKNTQEVFAQVKQIYKTPPIKDFGGFNFSQILPDPSKPSKRSPIEDLLFNKVTLADAGFIKQYGDCLGDIAARDLICAQKFNGLTVLPPLLTDEMIAQYTSALLAGTITSGWTFGAGPALQIPFPMQMAYRFNGIGVTQNVLYENQKLIANQFNSAIGKIQDSLSSTPSALGKLQDVVNQNAQALNTLVKQLSSNFGAISSVLNDILSRLDPPEAEVQIDRLITGRLQSLQTYVTQQLIRAAEIRASANLAATKMSECVLGQSKRVDFCGKGYHLMSFPQSAPHGVVFLHVTYVPAQEKNFTTAPAICHDGKAHFPREGVFVSNGTHWFVTQRNFYEPQIITTDNTFVSGNCDVVIGIVNNTVYDPLQPELDSFKEELDKYFKNHTSPDVDLGDISGINASVVNIQKEIDRLNEVAKNLNESLIDLQELGKYEQYIKWPWYIWLGFIAGLIAIVMVTIMLCCMTSCCSCLKGCCSCGSCCKFDEDDSEPVLKGVKLHYT

SEQ ID NO: 33 - protein, 1272 aa, synthetic construct
  REGION 1..1272: note = Recombinant Sequence
MFVFLVLLPLVSSQCVNLTTRTQLPPAYTNSFTRGVYYPDKVFRSSVLHSTQDLFLPFFSNVTWFHAIHVSGTNGTKRFGNPVLPFNDGVYFASTEKSNIIRGWIFGTTLDSKTQSLLIVNNATNVVIKVCEFQFCNDPFLGVYHKNNKSWMESESRVYSSANNCTFEYVSQPFLMDLEGKQGNFKNLREFVFKNIDGYFKIYSKHTPINLVRDLPQGFSALEPLVDLPIGINITRFQTLLALHRSYLTPGDSSSGWTAGAAAYYVGYLQPRTFLLKYNENGTITDAVDCALDPLSETKCTLKSFTVEKGIYQTSNFRVQPTESIVRFPNITNLCPFGEVFNATRFASVYAWNRKRISNCVADYSVLYNSASFSTFKCYGVSPTKLNDLCFTNVYADSFVIRGDEVRQIAPGQTGKIADYNYKLPDDFTGCVIAWNSNNLDSKVGGNYNYRYRLFRKSNLKPFERDISTEIYQAGSTPCNGVEGFNCYFPLQSYGFQPTNGVGYQPYRVVVLSFELLHAPATVCGPKKSTNLVKNKCVNFNFNGLTGTGVLTESNKKFLPFQQFGRDIADTTDAVRDPQTLEILDITPCSFGGVSVITPGTNTSNQVAVLYQGVNCTEVPVAIHADQLTPTWRVYSTGSNVFQTRAGCLIGAEHVNNSYECDIPIGAGICASYQTQTNSPGSASSVASQSIIAYTMSLGAENSVAYSNNSIAIPTNFTISVTTEILPVSMTKTSVDCTMYICGDSTECSNLLLQYGSFCTQLNRALTGIAVEQDKNTQEVFAQVKQIYKTPPIKDFGGFNFSQILPDPSKPSKRSPIEDLLFNKVTLADAGFIKQYGDCLGDIAARDLICAQKFNGLNVLPPLLTDEMIAQYTSALLAGTITSGWTFGAGPALQIPFPMQMAYRFNGIGVTQNVLYENQKLIANQFNSAIGKIQDSLSSTPSALGKLQHVVNQNAQALNTLVKQLSSNFGAISSVLNDILSRLDPPEAEVQIDRLITGRLQSLQTYVTQQLIRAAEIRASANLAATKMSECVLGQSKRVDFCGKGYHLMSFPQSAPHGVVFLHVTYVPAQEKNFTTAPAICHDGKAHFPREGVFVSNGTHWFVTQRNFYEPQIITTDNTFVSGNCDVVIGIVNNTVYDPLQPELDSFKEELDKYFKNHTSPDVDLGDISGINASVVNIQKEIDRLNEVAKNLNESLIDLQELGKYEQYIKWPWYIWLGFIAGLIAIVMVTIMLCCMTSCCSCLKGCCSCGSCCKFDEDDSEPVLKGVKLHYT

SEQ ID NO: 34 - protein, 1273 aa, synthetic construct
  REGION 1..1273: note = Recombinant Sequence
MFVFLVLLPLVSSQCVNLTTRTQLPPAYTNSFTRGVYYPDKVFRSSVLHSTQDLFLPFFSNVTWFHAIHVSGTNGTKRFDNPVLPFNDGVYFASTEKSNIIRGWIFGTTLDSKTQSLLIVNNATNVVIKVCEFQFCNDPFLGVYYHKNNKSWMESEFRVYSSANNCTFEYVSQPFLMDLEGKQGNFKNLREFVFKNIDGYFKIYSKHTPINLVRDLPQGFSALEPLVDLPIGINITRFQTLLALHRSYLTPGDSSSGWTAGAAAYYVGYLQPRTFLLKYNENGTITDAVDCALDPLSETKCTLKSFTVEKGIYQTSNFRVQPTESIVRFPNITNLCPFGEVFNATRFASVYAWNRKRISNCVADYSVLYNSASFSTFKCYGVSPTKLNDLCFTNVYADSFVIRGDEVRQIAPGQTGKIADYNYKLPDDFTGCVIAWNSNNLDSKVGGNYNYLYRLFRKSNLKPFERDISTEIYQAGSTPCNGVKGFNCYFPLQSYGFQPTNGVGYQPYRVVVLSFELLHAPATVCGPKKSTNLVKNKCVNFNFNGLTGTGVLTESNKKFLPFQQFGRDIADTTDAVRDPQTLEILDITPCSFGGVSVITPGTNTSNQVAVLYQGVNCTEVPVAIHADQLTPTWRVYSTGSNVFQTRAGCLIGAEHVNNSYECDIPIGAGICASYQTQTNSPGSASSVASQSIIAYTMSLGAENSVAYSNNSIAIPTNFTISVTTEILPVSMTKTSVDCTMYICGDSTECSNLLLQYGSFCTQLNRALTGIAVEQDKNTQEVFAQVKQIYKTPPIKDFGGFNFSQILPDPSKPSKRSPIEDLLFNKVTLADAGFIKQYGDCLGDIAARDLICAQKFNGLTVLPPLLTDEMIAQYTSALLAGTITSGWTFGAGPALQIPFPMQMAYRFNGIGVTQNVLYENQKLIANQFNSAIGKIQDSLSSTPSALGKLQDVVNQNAQALNTLVKQLSSNFGAISSVLNDILSRLDPPEAEVQIDRLITGRLQSLQTYVTQQLIRAAEIRASANLAATKMSECVLGQSKRVDFCGKGYHLMSFPQSAPHGVVFLHVTYVPAQEKNFTTAPAICHDGKAHFPREGVFVSNGTHWFVTQRNFYEPQIITTDNTFVSGNCDVVIGIVNNTVYDPLQPELDSFKEELDKYFKNHTSPDVDLGDISGINASFVNIQKEIDRLNEVAKNLNESLIDLQELGKYEQYIKWPWYIWLGFIAGLIAIVMVTIMLCCMTSCCSCLKGCCSCGSCCKFDEDDSEPVLKGVKLHYT

SEQ ID NO: 35 - protein, 1273 aa, synthetic construct
  REGION 1..1273: note = Recombinant Sequence
MFVFLVLLPLVSSQCVNLTTRTQLPPAYTNSFTRGVYYPDKVFRSSVLHSTQDLFLPFFSNVTWFHAIHVSGTNGTKRFDNPVLPFNDGVYFASTEKSNIIRGWIFGTTLDSKTQSLLIVNNATNVVIKVCEFQFCNDPFLGVYYHKNNKSWMESELRVYSSANNCTFEYVSQPFLMDLEGKQGNFKNLREFVFKNIDGYFKIYSKHTPINLVRDLPQGFSALEPLVDLPIGINITRFQTLLALHRSYLTPGDSSSGWTAGAAAYYVGYLQPRTFLLKYNENGTITDAVDCALDPLSETKCTLKSFTVEKGIYQTSNFRVQPTESIVRFPNITNLCPFGEVFNATRFASVYAWNRKRISNCVADYSFLYNSASFSTFKCYGVSPTKLNDLCFTNVYADSFVIRGDEVRQIAPGQTGKIADYNYKLPDDFTGCVIAWNSNNLDSKVGGNYNYLYRLFRKSNLKPFERDISTEIYQAGSTPCNGVEGFNCYFPLQSYGFQPTNGVGYQPYRVVVLSFELLHAPATVCGPKKSTNLVKNKCVNFNFNGLTGTGVLTESNKKFLPFQQFGRDIADTTDAVRDPQTLEILDITPCSFGGVSVITPGTNTSNQVAVLYHGVNCTEVPVAIHADQLTPTWRVYSTGSNVFQTRAGCLIGAEHVNNSYECDIPIGAGICASYQTQTNSRGSASSVASQSIIAYTMSLGAENSVAYSNNSIAIPTNFTISVTTEILPVSMTKTSVDCTMYICGDSTECSNLLLQYGSFCTQLNRALTGIAVEQDKNTQEVFAQVKQIYKTPPIKDFGGFNFSQILPDPSKPSKRSPIEDLLFNKVTLADAGFIKQYGDCLGDIAARDLICAQKFNGLTVLPPLLTDEMIAQYTSALLAGTITSGWTFGAGPALQIPFPMQMAYRFNGIGVTQNVLYENQKLIANQFNSAIGKIQDSLSSTPSALGKLQDVVNQNAQALNTLVKQLSSNFGAISSVLNDILSRLDPPEAEVQIDRLITGRLQSLQTYVTQQLIRAAEIRASANLAATKMSECVLGQSKRVDFCGKGYHLMSFPQSAPHGVVFLHVTYVPAQEKNFTTAPAICHDGKAHFPREGVFVSNGTHWFVTQRNFYEPQIITTDNTFVSGNCDVVIGIVNNTVYDPLQPELDSFKEELDKYFKNHTSPDVDLGDISGINASVVNIQKEIDRLNEVAKNLNESLIDLQELGKYEQYIKWPWYIWLGFIAGLIAIVMVTIMLCCMTSCCSCLKGCCSCGSCCKFDEDDSEPVLKGVKLHYT

SEQ ID NO: 36 - protein, 1273 aa, synthetic construct
  REGION 1..1273: note = Recombinant Sequence
MFVFFVLLPLVSSQCVNLTTRTQLPPAYTNSFTRGVYYPDKVFRSSVLHSTQDLFLPFFSNVTWFHAIHVSGTNGTKRFDNPVLPFNDGVYFASIEKSNIIRGWIFGTTLDSKTQSLLIVNNATNVVIKVCEFQFCNDPFLGVYYHKNNKSWMESEFRVYSSANNCTFEYVSQPFLMDLEGKQGNFKNLREFVFKNIDGYFKIYSKHTPINLVRDLPQGFSALEPLVDLPIGINITRFQTLLALHRSYLTPGGSSSGWTAGAAAYYVGYLQPRTFLLKYNENGTITDAVDCALDPLSETKCTLKSFTVEKGIYQTSNFRVQPTESIVRFPNITNLCPFGEVFNATRFASVYAWNRKRISNCVADYSVLYNSASFSTFKCYGVSPTKLNDLCFTNVYADSFVIRGDEVRQIAPGQTGKIADYNYKLPDDFTGCVIAWNSNNLDSKVGGNYNYLYRLFRKSNLKPFERDISTEIYQAGNTPCNGVEGFNCYFPLQSYGFQPTNGVGYQPYRVVVLSFELLHAPATVCGPKKSTNLVKNKCVNFNFNGLTGTGVLTESNKKFLPFQQFGRDIADTTDAVRDPQTLEILDITPCSFGGVSVITPGTNTSNQVAVLYQGVNCTEVPVAIHADQLTPTWRVYSTGSNVFQTRAGCLIGAEHVNNSYECDIPIGAGICASYQTQTNSPGSASSVASQSIIAYTMSLGAENSVAYSNNSIAIPTNFTISVTTEILPVSMTKTSVDCTMYICGDSTECSNLLLQYGSFCTQLNRALTGIAVEQDKNTQEVFAQVKQIYKTPPIKDFGGFNFSQILPDPSKPSKRSPIEDLLFNKVTLADAGFIKQYGDCLGDIAARDLICAQKFNGLTVLPPLLTDEMIAQYTSALLAGTITSGWTFGAGPALQIPFPMQMAYRFNGIGVTQNVLYENQKLIANQFNSAIGKIQDSLSSTPSALGKLQDVVNQNARALNTLVKQLSSNFGAISSVLNDILSRLDPPEAEVQIDRLITGRLQSLQTYVTQQLIRAAEIRASANLAATKMSECVLGQSKRVDFCGKGYHLMSFPQSAPHGVVFLHVTYVPAQEKNFTTAPAICHDGKAHFPREGVFVSNGTHWFVTQRNFYEPQIITTDNTFVSGNCDVVIGIVNNTVYDPLQPELDSFKEELDKYFKNHTSPDVDLGDISGINASVVNIQKEIDRLNEVAKNLNESLIDLQELGKYEQYIKWPWYIWLGFIAGLIAIVMVTIMLCCMTSCCSCLKGCCSCGSCCKFDEDDSEPVLKGVKLHYT

SEQ ID NO: 37 - protein, 1268 aa, synthetic construct
  REGION 1..1268: note = Recombinant Sequence
MFVFLVLLPLVSSQCVNLTTRTQLPPAYTNSFTRGVYYPDKVFRSSVLHSTQDLFLPFFSNVTWFHAIHVSGTNGTKRFDNPVLPFNDGVYFASTEKSNIIRGWIFGTTLDSKTQSLLIVNNATNVVIKVCEFQFCNDPFYYHKNNKSWMESEFRVYSSANNCTFEYVSQPFLMDLEGKQGNFKNLREFVFKNIDGYFKIYSKHTPINLVRDLPQGFSALEPLVDLPIGINITRFQTLLHRSYLTPGDSSSGWTAGAAACYVGYLQPRTFLLKYNENGTITDAVDCALDPLSETKCTLKSFTVEKGIYQTSNFRVQPTESIVRFPNITNLCPFGEVFNATRFASVYAWNRKRISNCVADYSVLYNSASFSTFKCYGVSPTKLNDLCFTNVYADSFVIRGDEVRQIAPGQTGKIADYNYKLPDDFTGCVIAWNSNNLDSKVGGNYNYLYRLFRKSNLKPFERDISTEIYQAGSTPCNGVKGFNCYFPLQSYGFQPTYGVGYQPYRVVVLSFELLHAPATVCGPKKSTNLVKNKCVNFNFNGLTGTGVLTESNKKFLPFQQFGRDIADTTDAVRDPQTLEILDITPCSFGGVSVITPGTNTSNQVAVLYQGVNCTEVPVAIHADQLTPTWRVYSTGSNVFQTRAGCLIGAEHVNNSYECDIPIGAGICASYQTQTNSHGSASSVASQSIIAYTMSLGAENSVAYSNNSIAIPTNFTISVTTEILPVSMTKTSVDCTMYICGDSTECSNLLLQYGSFCTQLNRALTGIAVEQDKNTQEVFAQVKQIYKTPPIKDFGGFNFSQILPDPSKPSKRSPIEDLLFNKVTLADAGFIKQYGDCLGDIAARDLICAQKFNGLTVLPPLLTDEMIAQYTSALLAGTITSGWTFGAGPALQIPFPMQMAYRFNGIGVTQNVLYENQKLIANQFNSAIGKIQDSLSSTPSALGKLQDVVNQNAQALNTLVKQLSSNFGAISSVLNDILSRLDPPEAEVQIDRLITGRLQSLQTYVTQQLIRAAEIRASANLAATKMSECVLGQSKRVDFCGKGYHLMSFPQSAPHGVVFLHVTYVPAQEKNFTTAPAICHDGKAHFPRKGVFVSNGTYWFVTQRNFYEPQIITTDNTFVSGNCDVVIGIVNNTVYDPLQPELDSFKEELDKYFKNHTSPDVDLGDISGINASFVNIQKEIDRLNEVAKNLNESLIDLQELGKYEQYIKWPWYIWLGFIAGLIAIVMVTIMLCCMTSCCSCLKGCCSCGSCCKFDEDDSEPVLKGVKLHYT

SEQ ID NO: 38 - protein, 1273 aa, synthetic construct
  REGION 1..1273: note = Recombinant Sequence
MFVFLVLLPLVSSQCVNFTTRTQLPPAYTNSFTRGVYYPDKVFRSSVLHSTQDLFLPFFSNVTWFHAIHVSGTNGTKRFDNPVLPFNDGVYFASTEKSNIIRGWIFGTTLDSKTQSLLIVNNATNVVIKVCEFQFCNDPFLGVYYHKNNKSWMESEFRVYSSANNCTFEYVSQPFLMDLEGKQGNFKNLREFVFKNIDGYFKIYSKHTPINLVRDLPQGFSALEPLVDLPIGINITRFQTLLALHRSYLTPGDSSSGWTAGAAAYYVGYLQPRTFLLKYNENGTITDAVDCALDPLSETKCTLKSFTVEKGIYQTSNFRVQPTESIVRFPNITNLCPFGEVFNATRFASVYAWNRKRISNCVADYSVLYNSASFSTFKCYGVSPTKLNDLCFTNVYADSFVIRGDEVRQIAPGQTGKIADYNYKLPDDFTGCVIAWNSNNLDSKVGGNYNYRYRLFRKSNLKPFERDISTEIYQAGSTPCNGVEGFNCYFPLQSYGFQPTYGVGYQPYRVVVLSFELLHAPATVCGPKKSTNLVKNKCVNFNFNGLTGTGVLTESNKKFLPFQQFGRDIADTTDAVRDPQTLEILDITPCSFGGVSVITPGTNTSNQVAVLYQGVNCTEVPVAIHADQLTPTWRVYSTGSNVFQTRAGCLIGVEYVNNSYECDIPIGAGICASYQTQTNSPGSASSVASQSIIAYTMSLGAENSVAYSNNSIAIPTNFTISVTTEILPVSMTKTSVDCTMYICGDSTECSNLLLQYGSFCTQLNRALTGIAVEQDKNTQEVFAQVKQIYKTPPIKYFGGFNFSQILPDPSKPSKRSPIEDLLFNKVTLADAGFIKQYGDCLGDIAARDLICAQKFNGLTVLPPLLTDEMIAQYTSALLAGTITSGWTFGAGPALQIPFPMQMAYRFNGIGVTQNVLYENQKLIANQFNSAIGKIQDSLSSTPSALGKLQDVVNQNAQALNTLVKQLSSNFGAISSVLNDILSRLDPPEAEVQIDRLITGRLQSLQTYVTQQLIRAAEIRASANLAATKMSECVLGQSKRVDFCGKGYHLMSFPQSAPHGVVFLHVTYVPAQEKNFTTAPAICHDGKAHFPREGVFVSNGTHWFVTQRNFYEPQIITTDNTFVSGNCDVVIGIVNNTVYDPLQPELDSFKEELDKYFKNHTSPDVDLGDISGINASVVNIQKEIDRLNEVAKNLNESLIDLQELGKYEQYIKWPWYIWLVFIAGLIAIVMVTIMLCCMTSCCSCLKGCCSCGSCCKFDEDDSEPVLKGVKLHYT

SEQ ID NO: 39 - protein, 1273 aa, synthetic construct
  REGION 1..1273: note = Recombinant Sequence
MFVFLVLLPLVSSQCVNLTTRTQLPPAYTNSFTRGVYYPDKVFRSSVLHSTQDLFLPFFSNVTWFHAIHVSGTNGTKRFDNPVLPFNDGVYFASTEKSNIIRGWIFGTTLDSKTQSLLIVNNATNVVIKVCEFQFCNDPFLGVYYHKNNKSWMESEFRVYSSANNCTFEYVSQPFLMDLEGKQGNFKNLREFVFKNIDGYFKIYSKHTPINLVRDLPQGFSALEPLVDLPIGINITRFQTLLALHRSYLTPGDSSSGWTAGAAAYYVGYLQPRTFLLKYNENGTITDAVDCALDPLSETKCTLKSFTVEKGIYQTSNFRVQPTESIVRFPNITNLCPFGEVFNATRFASVYAWNRKRISNCVADYSVLYNSASFSTFKCYGVSPTKLNDLCFTNVYADSFVIRGDEVRQIAPGQTGKIADYNYKLPDDFTGCVIAWNSNNLDSKVGGNYNYLYRLFRKSNLKPFERDISTEIYQAGSTPCNGVEGFNCYFPLQSYGFQPTTGVGYQPYRVVVLSFELLHAPATVCGPKKSTNLVKNKCVNFNFNGLTGTGVLTESNKKFLPFQQFGRDIADTTDAVRDPQTLEILDITPCSFGGVSVITPGTNTSNQVAVLYQDVNCTEVPVAIHADQLTPTWRVYSTGSNVFQTRAGCLIGAEHVNNSYECDIPIGAGICASYQTQTNSPGSASSVASQSIIAYTMSLGAENSVAYSNNSIAIPTNFTISVTTEILPVSMTKTSVDCTMYICGDSTECSNLLLQYGSFCTQLNRALTGIAVEQDKNTQEVFAQVKQIYKTPPIKDFGGFNFSQILPDPSKPSKRSPIEDLLFNKVTLADAGFIKQYGDCLGDIAARDLICAQKFNGLTVLPPLLTDEMIAQYTSALLAGTITSGWTFGAGPALQIPFPMQMAYRFNGIGVTQNVLYENQKLIANQFNSAIGKIQDSLSSTPSALGKLQDVVNQNAQALNTLVKQLSSNFGAISSVLNDILSRLDPPEAEVQIDRLITGRLQSLQTYVTQQLIRAAEIRASANLAATKMSECVLGQSKRVDFCGKGYHLMSFPQSAPHGVVFLHVTYVPAQEKNFTTAPAICHDGKAHFPREGVFVSNGTHWFVTQRNFYEPQIITTDNTFVSGNCDVVIGIVNNTVYDPLQPELDSFKEELDKYFKNHTSPDVDLGDISGINASVVNIQKEIDRLNEVAKNLNESLIDLQELGKYEQYIKWPWYIWLGFIAGLIAIVMVTIMLCCMTSCCSCLKGCCSCGSCCKFDEDDSEPVLKGVKLHYT

SEQ ID NO: 40 - protein, 1273 aa, synthetic construct
  REGION 1..1273: note = Recombinant Sequence
MFVFFVLLPLVSSQCVNLTTRTQLPPAYTNSFTRGVYYPDKVFRSSVLHSTQDLFLPFFSNVTWFHAIHVSGTNGTKRFDNPVLPFNDGVYFASIEKSNIIRGWIFGTTLDSKTQSLLIVNNATNVVIKVCEFQFCNDPFLGVYYHKNNKSWMESEFRVYSSANNCTFEYVSQPFLMDLEGKQGNFKNLREFVFKNIDGYFKIYSKHTPINLVRDLPQGFSALEPLVDLPIGINITRFQTLLALHRSYLTPGGSSSGWTAGAAAYYVGYLQPRTFLLKYNENGTITDAVDCALDPLSETKCTLKSFTVEKGIYQTSNFRVQPTESIVRFPNITNLCPFGEVFNATRFASVYAWNRKRISNCVADYSVLYNSASFSTFKCYGVSPTKLNDLCFTNVYADSFVIRGDEVRQIAPGQTGKIADYNYKLPDDFTGCVIAWNSNNLDSKVGGNYNYLYRLFRKSNLKPFERDISTEIYQAGSTPCNGVEGFNCYFPLQSYGFQPTNGVGYQPYRVVVLSFELLHAPATVCGPKKSTNLVKNKCVNFNFNGLTGTGVLTESNKKFLPFQQFGRDIADTTDAVRDPQTLEILDITPCSFGGVSVITPGTNTSNQVAVLYQGVNCTEVPVAIHADQLTPTWRVYSTGSNVFQTRAGCLIGAEHVNNSYECDIPIGAGICASYQTQTNSPGSASSVASQSIIAYTMSLGVENSVAYSNNSIAIPTNFTISVTTEILPVSMTKTSVDCTMYICGDSTECSNLLLQYGSFCTQLNRALTGIAVEQDKNTQEVFAQVKQIYKTPPIKDFGGFNFSQILPDPSKPSKRSPIEDLLFNKVTLADAGFIKQYGDCLGDIAARDLICAQKFNGLTVLPPLLTDEMIAQYTSALLAGTITSGWTFGAGPALQIPFPMQMAYRFNGIGVTQNVLYENQKLIANQFNSAIGKIQDSLSSTPSALGKLQDVVNQNAQALNTLVKQLSSNFGAISSVLNDILSRLDPPEAEVQIDRLITGRLQSLQTYVTQQLIRAAEIRASANLAATKMSECVLGQSKRVDFCGKGYHLMSFPQSAPHGVVFLHVTYVPAQEKNFTTAPAICHDGKAHFPREGVFVSNGTHWFVTQRNFYEPQIITTDNTFVSGNCDVVIGIVNNTVYDPLQPELDSFKEELDKYFKNHTSPDVDLGDISGINASVVNIQKEIDRLNEVAKNLNESLIDLQELGKYEQYIKWPWYIWLGFIAGLIAIVMVTIMLCCMTSCCSCLKGCCSCGSCCKFDEDDSEPVLKGVKLHYT

SEQ ID NO: 41 - protein, 1273 aa, synthetic construct
  REGION 1..1273: note = Recombinant Sequence
MFVFLVLLPLVSSQCVNLTTRTQLPPAYTNSFTRGVYYPDKVFRSSVLHSTQDLFLPFFSNVTWFHAIHVSGTNGTKRFDNPVLPFNDGVYFASTEKSNIIRGWIFGTTLDSKTQSLLIVNNATNVVIKVCEFQFCNDPFLSVYYHKNNKSWMESEFRVYSSANNCTFEYVSQPFLMDLVGKQGNFKNLREFVFKNIDGYFKIYSKHTPINLVRDLPQGFSALEPLVDLPIGINITRFQTLLALHRSYLTPGDSSSGWTAGAAAYYVGYLQPRTFLLKYNENGTITDAVDCALDPLSETKCTLKSFTVEKGIYQTSNFRVQPTESIVRFPNITNLCPFGEVFNATRFASVYAWNRKRISNCVADYSVLYNSASFSTFKCYGVSPTKLNDLCFTNVYADSFVIRGDEVRQIAPGQTGKIADYNYKLPDDFTGCVIAWNSNNLDSKVGGNYNYLYRLFRKSNLKPFERDISTEIYQAGSTPCNGVEGFNCYFPLQSYGFQPTNGVGYQPYRVVVLSFELLHAPATVCGPKKSTNLVKNKCVNFNFNGLTGTGVLTESNKKFLPFQQFGRDIADTTDAVRDPQTLEILDITPCSFGGVSVITPGTNTSNQVAVLYQGVNCTEVPVAIHADQLTPTWRVYSTGSNVFQTRAGCLIGAEHVNNSYECDIPIGAGICASYQTHTNSPGSASSVASQSIIAYTMSLGAENSVAYSNNSIAIPTNFTISVTTEILPVSMTKTSVDCTMYICGDSTECSNLLLQYGSFCTQLNRALTGIAVEQDKNTQEVFAQVKQIYKTPPIKDFGGFNFSQILPDPSKPSKRSPIEDLLFNKVTLADAGFIKQYGDCLGDIAARDLICAQKFNGLTVLPPLLTDEMIAQYTSALLAGTITSGWTFGAGPALQIPFPMQMAYRFNGIGVTQNVLYENQKLIANQFNSAIGKIQDSLSSTPSALGKLQDVVNQNAQALNTLVKQLSSNFGAISSVLNDILSRLDPPEAEVQIDRLITGRLQSLQTYVTQQLIRAAEIRASANLAATKMSECVLGQSKRVDFCGKGYHLMSFPQSAPHGVVFLHVTYVPAQEKNFTTAPAICHDGKAHFPREGVFVSNGTHWFVTQRNFYEPQIITTDNTFVSGNCDVVIGIVNNTVYDPLQPELDSFKEELDKYFKNHTSPDVDLGDISGINASVVNIQKEIDRLNEVAKNLNESLIDLQELGKYEQYIKWPWYIWLGFIAGLIAIVMVTIMLCCMTSCCSCLKGCCSCGSCCKFDEDDSEPVLKGVKLHYT

SEQ ID NO: 42 - protein, 1273 aa, synthetic construct
  REGION 1..1273: note = Recombinant Sequence
MFVFLVLLPLVSSQCVNLTTRTQLPPAYTNSFTRGVYYPDKVFRSSVLHSTQDLFLPFFSNVTWFHAIHVSGTNGTKRFDNPVLPFNDGVYFASTEKSNIIRGWIFGTTLDSKTQSLLIVNNATNVVIKVCEFQFCNDPFLGVYYHKNNKSWMESEFRVYSSANNCTFEYVSQPFLMDLEGKQGNFKNLREFVFKNIDGYFKIYSKHTPINLVRDLPQGFSALEPLVDLPIGINITRFQTLLALHRSYLTPGDSSSGWTAGAAAYYVGYLQPRTFLLKYNENGTITDAVDCALDPLSETKCTLKSFTVEKGIYQTSNFRVQPTESIVRFPNITNLCPFGEVFNATRFASVYAWNRKRISNCVADYSVLYNSASFSTFKCYGVSPTKLNDLCFTNVYADSFVIRGDEVRQIAPGQTGKIADYNYKLPDDFTGCVIAWNSNNLDSKVGGNYNYLYRLFRKSNLKPFERDISTEIYQAGSTPCNGVKGFNCYFPLQPYGFQPTYGVGYQPYRVVVLSFELLHAPATVCGPKKSTNLVKNKCVNFNFNGLTGTGVLTESNKKFLPFQQFGRDIADTTDAVRDPQTLEILDITPCSFGGVSVITPGTNTSNQVAVLYQGVNCTEVPVAIHADQLTPTWRVYSTGSNVFQTRAGCLIGAEHVNNSYECDIPIGAGICASYQTQTNSHGSASSVASQSIIAYTMSLGAENSVAYSNNSIAIPTNFTISVTTEILPVSMTKTSVDCTMYICGDSTECSNLLLQYGSFCTQLNRALTGIAVEQDKNTQEVFAQVKQIYKTPPIKDFGGFNFSQILPDPSKPSKRSPIEDLLFNKVTLADAGFIKQYGDCLGDIAARDLICAQKFNGLTVLPPLLTDEMIAQYTSALLAGTITSGWTFGAGPALQIPFPMQMAYRFNGIGVTQNVLYENQKLIANQFNSAIGKIQDSLSSTPSALGKLQDVVNQNAQALNTLVKQLSSNFGAISSVLNDILSRLDPPEAEVQIDRLITGRLQSLQTYVTQQLIRAAEIRASANLAATKMSECVLGQSKRVDFCGKGYHLMSFPQSAPHGVVFLHVTYVPAQEKNFTTAPAICHDGKAHFPREGVFVSNGTHWFVTQRNFYKPQIITTDNTFVSGNCDVVIGIVNNTVYDPLQPELDSFKEELDKYFKNHTSPDVDLGDISGINASVVNIQKEIDRLNEVAKNLNESLIDLQELGKYEQYIKWPWYIWLGFIAGLIAIVMVTIMLCCMTSCCSCLKGCCSCGSCCKFDEDDSEPVLKGVKLHYT

SEQ ID NO: 43 - protein, 1272 aa, synthetic construct
  REGION 1..1272: note = Recombinant Sequence
MFVFLVLLPLVSSQCVNLTTRTQLPPAYTNSFTRGVYYPDKVFRSSVLHSTQDLFLPFFSNVTWFDAIHVSGTNGTKRFDNPVLPFNDGVYFASTEKSNIIRGWIFGTTLDSKTQSLLIVNNATNVVIKVCEFQFCNDPFLVVYHKNNKSWMESEFRVYSSANNCTFEYVSQPFLMDLEGKQGNFKNLREFVFKNIDGYFKIYSKHTPINLVRGLPQGFSALEPLVDLPIGINITRFQTLLALHRSYLTPGDSSSGWTAGAAAYYVGYLQPRTFLLKYNENGTITDAVDCALDPLSETKCTLKSFTVEKGIYQTSNFRVQPTESIVRFPNITNLCPFGEVFNATRFASVYAWNRKRISNCVADYSVLYNSASFSTFKCYGVSPTKLNDLCFTNVYADSFVIRGDEVRQIAPGQTGKIADYNYKLPDDFTGCVIAWNSNNLDSKVGGNYNYLYRLFRKSNLKPFERDISTEIYQAGSTPCNGAEGFNCYFPLQSYGFQPTNGVGYQPYRVVVLSFELLHAPATVCGPKKSTNLVKNKCVNFNFNGLTGTGVLTESNKKFLPFQQFGRDIADTTDAVRDPQTLEILDITPCSFGGVSVITPGTNTSNQVAVLYQDVNCTEVPVAIHADQLTPTWRVYSTGSNVFQTRAGCLIGAEYVNNSYECDIPIGASICASYQTQTNSPGSASSVASQSIIAYTMSLGAENSVAYSNNSIAIPTNFTISVTTEILPVSMTKTSVDCTMYICGDSTECSNLLLQYGSFCTQLNRALTGIAVEQDKNTQEVFAQVKQIYKTPPIKDFGGFNFSQILPDPSKPSKRSPIEDLLFNKVTLADAGFIKQYGDCLGDIAARDLICAQKFNGLTVLPPLLTDEMIAQYTSALLAGTITSGWTFGAGPALQIPFPMQMAYRFNGIGVTQNVLYENQKLIANQFNSAIGKIQDSLSSTPSALGKLRDVVNQNAQALNTLVKQLSSNFGAISSVLNDILSRLDPPEAEVQIDRLITGRLQSLQTYVTQQLIRAAEIRASANLAATKMSECVLGQSKRVDFCGKGYHLMSFPQSAPHGVVFLHVTYVPAQEKNFTTAPAICHDGKDHFPREGVFVSNGTHWFVTQRNFYEPQIITTDNTFVSGNCDVVIGIVNNTVYDPLQPELDSFKEELDKYFKNHTSPDVDLGDISGINASVVNIQKEIDRLNEVAKNLNESLIDLQELGKYEQYIKWPWYIWLGFIAGLIAIVMVTIMLCCMTSCCSCLKGCCSCGSCCKFDEDDSEPVLKGVKLHYT

SEQ ID NO: 44 - protein, 1273 aa, synthetic construct
  REGION 1..1273: note = Recombinant Sequence
MFVFLVLLPLVSSQCVNLTTRTQLPPAYTNSFTRGVYYPDKVFRSSVLHSTQDLFLPFFSNVTWFHAIHVSGTNGTKRFDNPVLPFNDGVYFASTEKSNIIRGWIFGTTLDSKTQSLLIVNNATNVVIKVCEFQFCNDPFLGVYYHKNNKSWMESEFRVYSSANNCTFEYVSQPFLMDLEGKQGNFKNLREFVFKNIDGYFKIYSKHTPINLVRDLPQGFSALEPLVDLPIGINITRFQTLLALHRSYLTPGDSSSGWTAGAAAYYVGYLQPRTFLLKYNENGTITDAVDCALDPLSETKCTLKSFTVEKGIYQTSNFRVQPTESIVRFPNITNLCPFGEVFNATRFASVYAWNRKRISNCVADYSVLYNSASFSTFKCYGVSPTKLNDLCFTNVYADSFVIRGDEVRQIAPGQTGKIADYNYKLPDDFTGCVIAWNSNNLDSKVGGNYNYLYRLFRKSNLKPFERDISTEIYQAGSTPCNGVEGFNCYFPLQPYGFQPTNGVGYQPYRVVVLSFELLHAPATVCGPKKSTNLVKNKCVNFNFNGLTGTGVLTESNKKFLPFQQFGRDIADTTDAVRDPQTLEILDITPCSFGGVSVITPGTNTSNQVAVLYQGVNCTEVPVAIHADQLTPTWRVYSTGSNVFQTRAGCLIGAEHVNNSYECDIPIGAGICASYQTQTNSHGSASSVASQSIIAYTMSLGAENSVAYSNNSIAIPINFTISVTTEILPVSMTKTSVDCTMYICGDSTECSNLLLQYGSFCTQLNRALTGIAVEQDKNTQEVFAQVKQIYKTPPIKDFGGFNFSQILPDPSKPSKRSPIEDLLFNKVTLADAGFIKQYGDCLGDIAARDLICAQKFNGLTVLPPLLTDEMIAQYTSALLAGTITSGWTFGAGPALQIPFPMQMAYRFNGIGVTQNVLYENQKLIANQFNSAIGKIQDSLSSTPSALGKLQDVVNQNAQALNTLVKQLSSNFGAISSVLNDILSRLDPPEAEVQIDRLITGRLQSLQTYVTQQLIRAAEIRASANLAATKMSECVLGQSKRVDFCGKGYHLMSFPQSAPHGVVFLHVTYVPAQEKNFTTAPAICHDGKAHFPREGVFVSNGTHWFVTQRNFYEPQIITTDNTFVSGNCDVVIGIVNNTVYDPLQPELDSFKEELDKYFKNHTSPDVDLGDISGINASVVNIQKEIDRLNEVAKNLNESLIDLQELGKYEQYIKWPWYIWLGFIAGLIAIVMVTIMLCCMTSCCSCLKGCCSCGSCCKFDEDDSEPVLKGVKLHYT

SEQ ID NO: 45 - protein, 226 aa, synthetic construct
  REGION 1..226: note = Recombinant Sequence
MENTTSGFLGPLLVLQAGFFLLTRILTIPQSLDSWWTSLNFLGGAPTCPGQNSQSPTSNHSPTSCPPICPGYRWMCLRRFIIFLFILLLCLIFLLVLLDYQGMLPVCPLLPGTSTTSTGPCKTCTIPAQGTSMFPSCCCTKPSDGNCTCIPIPSSWAFAKFLWEWASVRFSWLSLLVPFVQWFVGLSPTVWLSVIWMMWYWGPRLYNILSPFLPLLPIFFCLWVYI

SEQ ID NO: 46 - protein, 226 aa, synthetic construct
  REGION 1..226: note = Recombinant Sequence
MENITSGFLGPLLVLQAGFFLLTRILTIPQSLDSWWTSLNFLGGTTVCLGQNSQSPTSNHSPTSCPPTCPGYRWMCLRRFIIFLFILLLCLIFLLVLLDYQGMLPVCPLIPGSSTTSTGPCRTCMTTAQGTSMYPSCCCTKPSDGNCTCIPIPSSWAFGKFLWEWASARFSWLSLLVPFVQWFVGLSPTVWLSVIWMMWYWGPSLYSILSPFLPLLPIFFCLWVYI

SEQ ID NO: 47 - protein, 226 aa, synthetic construct
  REGION 1..226: note = Recombinant Sequence
MESTTSGFLGPLLVLQAGFFLLTRILTIPQSLDSWWTSLNFLGGAPTCPGQNSQSPTSNHSPTSCPPICPGYRWMCLRRFIIFLFILLLCLIFLLVLLDYQGMLAVCPLLPGTSTTSTGPCRTCTIPAQGTSMFPSCCCTKPSDGNCTCIPIPSSWAFARFLWEWASVRFSWLSSLVPFVQWFAGLSPTVWLSVIWMMWYWGPSLYNILSPFLPLLPIFFCLWVYI

SEQ ID NO: 48 - protein, 281 aa, synthetic construct
  REGION 1..281: note = Recombinant Sequence
MQWNSSTFHQALLDPRVRGLYFPAGGSSSGTVNPVPTTASPISSIFSRTGDPAPNMESTTSGFLGPLLALQAGFFLLTRILTIPQSLDSWWTSLNFLGGAPTCPGQNLQSPTSNHSPTSCPPICPGYRWMCLRRFIIFLFILLLCLIFLLVLLDYQGMLPVCPLLPGTSTTSTGPCKTCTIPAQGTSMFPSCCCTKPSDGNCTCIPIPSSWAFARFLWEWASVRFSWLSLLVPFVQWFVGLSPTVWLSVIWMMWYWGPSLYNILNPFLPLLPIFFCLWVYI

SEQ ID NO: 49 - protein, 281 aa, synthetic construct
  REGION 1..281: note = Recombinant Sequence
MQWNSTTFHQTLQDPRVRALYFPAGGSSSGTLSPAQNTVSTISSILSKTGDPVPNMENIASGLLGPLLVLQAGFFLLTKILTIPQSLDSWWTSLNFLGGTPVCLGQNSQSQISSHSPTCCPPICPGYRWMCLRRFIIFLCILLLCLIFLLVLLDYQGMLPVCPLIPGSSTTSTGPCKTCTTPAQGTSMFPSCCCTKPTDGNCTCIPIPSSWAFAKYLWEWASVRFSWLSLLVPFVQWFVGLSPTVWLSVIWMMWYWGPSLYNILSPFMPLLPIFFCLWVYI

SEQ ID NO: 50 - protein, 281 aa, synthetic construct
  REGION 1..281: note = Recombinant Sequence
MQWNSTQFHQALLDPRVRGLYFPAGGSSSETQNPAPTIASLTSSIFSKTGDPAMNMENITSGLLGPLLVLQAVCFLLTKILTIPQSLDSWWTSLNFLGVPPGCPGQNSQSPISNHLPTSCPPTCPGYRWMCLRRFIIFLFILLLCLIFLLVLLDYQGMLPVCPLLPGSTTTSTGPCKTCTTLAQGTSMFPSCCCIKPSDGNCTCIPIPSSWAFGKYLWEWASARFSWLSLLVQFVQWCVGLSPTVWLLVIWMIWYWGPNLCSILSPFIPLLPIFCYLWASI

SEQ ID NO: 51 - protein, 281 aa, synthetic construct
  REGION 1..281: note = Recombinant Sequence
MQWNSTTFHQTLQDPRVRALYFPAGGSSSGTVSPAQNTVSAISSILSKTGDPVPNMENIASGLLGPLLVLQAGFFLLTKILTIPQSLDSWWTSLNFLGGTPVCLGQNSQSQTSSHSPTCCPPICPGYRWMCLRRFIIFLCILLLCLIFLLVLLDYQGMLPVCPLIPGSSTTSTGPCRTCTTPAQGTSMFPSCCCTKPTDGNCTCIPIPSSWAFAKYLWEWASVRFSWLSLLVPFVQWFVGLSPTVWLSVIWMMWFWGPSLYNILSPFMPLLPIFFCLWVYI

SEQ ID NO: 52 - protein, 281 aa, synthetic construct
  REGION 1..281: note = Recombinant Sequence
MQWNSTTFHQALLDPRVRGLYFPAGGSSSGTVNPVPTTASPISSILSKTGDPAPNMENITSGLLGPLLVLQAGFFLLTKILTMPQSLDSWWTSHNFLGGTPVCLGQNSQSQISSHSPTCCPPICPGYRWMCLRRFIIFLFILLLCLIFLLVLLDYQGMLPVCPLLPGTSTTSTGTCRTCTIPAQGTSMFPSCCCTKPSAGNCTCIPIPSSWAFARFLWEWASVRFSWLSLLVPFVQWFVGLSPTVWLSVIWMMWYWGPSLYNILSPFLPLLPIFFCLWVYI

SEQ ID NO: 53 - protein, 400 aa, synthetic construct
  REGION 1..400: note = Recombinant Sequence
MGGWSSKPRQGMGTNLSVPNPLGFFPDHQLDPAFGANSNNPDWDFNPNKDQWPEANQVGAGAFGPGFTPPHGGLLGWSPQAQGILTTVPAAPPPASTNRQSGRQPTPISPPLRDSHPQAMQWNSTTFHQALLDPRVRGLYFPAGGSSSGTVNPVPTTASPISSIFSRTGDPAPNMENTTSGFLGPLLVLQAGFFLLTRILTIPQSLDSWWTSLNFLGGAPTCPGQNSQSPTSNHSPTSCPPICPGYRWMCLRRFIIFLFILLLCLIFLLVLLDYQGMLPVCPLLPGTSTTSTGPCKTCTIPAQGTSMFPSCCCTKPSDGNCTCIPIPSSWAFARFLWEWASVRFSWLSLLVPFVQWFVGLSPTVWLSVIWMMWYWGPSLYNILSPFLPLLPIFFCLWVYI

SEQ ID NO: 54 - protein, 400 aa, synthetic construct
  REGION 1..400: note = Recombinant Sequence
MGGWSSKPRKGMGTNLSVPNPLGFFPDHQLDPAFGANSNNPDWDFNPIKDHWPQANQVGVGAFGPGFTPPHGGVLGWSPQAQGILATVPAMPPPASTNRQSGRQPTPISPPLRDSHPQAMQWNSTAFHQALQDPRVRGLYFPAGGSSSGTLNPVPTIASHISSISSRIGDPAPNMENITSGFLGPLLVLQAGFFLLTRILTIPQSLDSWWTSLNFLGGAPVCLGQNSQSPTSNHSPTSCPPICPGYRWMCLRRFIIFLFILLLCLIFLLVLLDYQGMLPVCPLIPGSTTTSTGPCKTCTTPAQGNSMFPSCCCTKPTDGNCTCIPIPSSWAFAKYLWEWASVRFSWLSLLVPFVQWFVGLSPTVWLSAIWMMWYWGPSLYNILSPFIPLLPIFFCLWVYI

SEQ ID NO: 55 - protein, 400 aa, synthetic construct
  REGION 1..400: note = Recombinant Sequence
MGGWSSKHRKGMGTNLSVPNPLGFFPDHQLDPAFGANSNNPDWDFNPNKDHWPEANQVGAGAFGPGFTPPHGGFLGWSPQAQGILTTVPAAPPPASTNRQSGRQPTPISPPLRDTHPQAMQWNSTAFHQALQDPRVRGLYFPAGGSSSGTVNPVPNTVSHISSIFTKTGDPASNMESTTSGFLGPLLVLQAGFFLLTRILTIPQSLDSWWTSLNFLGGAPGCIGQNSQSQTSNHSPTSCPPTCPGYRWMCLRRFIIFLFILLLCLIFLLVLLDYQGMLPVCPLLPGSTTTSTGPCRTCTITAQGTSMFPSCCCTKPSDGNCTCIPIPSSWGFAKFLWEWASVRFSWLSLLVPFVQWFAGLSPTVWLSVIWMIWYWGPSLYNILSPFLPLLPIFLCLWVYI

SEQ ID NO: 56 - protein, 400 aa, synthetic construct
  REGION 1..400: note = Recombinant Sequence
MGGWSSKPRQGMGTNLSVPNPLGFFPDHQLDPAFGANSNNPDWDFNPNKDHWPEANQVGAGAFGPGFTPPHGGLLGWSPQAQGILTTLPAAPPPASTNRQSGRQPTPISPPLRDSHPQAMQWNSTTFHQALLDPRVRGLYFPAGGSSSGTVNPVPTTASPISSIFSRTGDPAPNMESTTSGFLGPLLVLQAGFFLLTRILTIPQSLDSWWTSLNFLGGAPTCPGQNSQSPTSNHSPTSCPPTCPGYRWMCLRRFIIFLFILLLCLIFLLVLLDYQGMLPVCPLLPGTSTTSTGPCRTCTIPAQGTSMFPSCCCTKPSDGNCTCIPIPSSWAFARFLWEWASVRFSWLSLLVPFVQWFVGLSPTVWLSAIWMMWYWGPSLYNILSPFLPLLPIFFCLWVYI

SEQ ID NO: 57 - protein, 1446 aa, synthetic construct
  REGION 1..1446: note = Recombinant Sequence
MFVFLVLLPLVSSQCVNLRTRTQLPPAYTNSFTRGVYYPDKVFRSSVLHSTQDLFLPFFSNVTWFHAIHVSGTNGTKRFDNPVLPFNDGVYFASTEKSNIIRGWIFGTTLDSKTQSLLIVNNATNVVIKVCEFQFCNDPFLDVYYHKNNKSWMESGVYSSANNCTFEYVSQPFLMDLEGKQGNFKNLREFVFKNIDGYFKIYSKHTPINLVRDLPQGFSALEPLVDLPIGINITRFQTLLALHRSYLTPGDSSSGWTAGAAAYYVGYLQPRTFLLKYNENGTITDAVDCALDPLSETKCTLKSFTVEKGIYQTSNFRVQPTESIVRFPNITNLCPFGEVFNATRFASVYAWNRKRISNCVADYSVLYNSASFSTFKCYGVSPTKLNDLCFTNVYADSFVIRGDEVRQIAPGQTGKIADYNYKLPDDFTGCVIAWNSNNLDSKVGGNYNYRYRLFRKSNLKPFERDISTEIYQAGSKPCNGVEGFNCYFPLQSYGFQPTNGVGYQPYRVVVLSFELLHAPATVCGPKKSTNLVKNKCVNFNFNGLTGTGVLTESNKKFLPFQQFGRDIADTTDAVRDPQTLEILDITPCSFGGVSVITPGTNTSNQVAVLYQGVNCTEVPVAIHADQLTPTWRVYSTGSNVFQTRAGCLIGAEHVNNSYECDIPIGAGICASYQTQTNSRGSASSVASQSIIAYTMSLGAENSVAYSNNSIAIPTNFTISVTTEILPVSMTKTSVDCTMYICGDSTECSNLLLQYGSFCTQLNRALTGIAVEQDKNTQEVFAQVKQIYKTPPIKDFGGFNFSQILPDPSKPSKRSPIEDLLFNKVTLADAGFIKQYGDCLGDIAARDLICAQKFNGLTVLPPLLTDEMIAQYTSALLAGTITSGWTFGAGPALQIPFPMQMAYRFNGIGVTQNVLYENQKLIANQFNSAIGKIQDSLSSTPSALGKLQNVVNQNAQALNTLVKQLSSNFGAISSVLNDILSRLDPPEAEVQIDRLITGRLQSLQTYVTQQLIRAAEIRASANLAATKMSECVLGQSKRVDFCGKGYHLMSFPQSAPHGVVFLHVTYVPAQEKNFTTAPAICHDGKAHFPREGVFVSNGTHWFVTQRNFYEPQIITTDNTFVSGNCDVVIGIVNNTVYDPLQPELDSFKEELDKYFKNHTSPDVDLGDISGINASVVNIQKEIDRLNEVAKNLNESLIDLQELGKYGSGSGSGSGSGSGSGSMENTTSGFLGPLLVLQAGFFLLTRILTIPQSLDSWWTSLNFLGGAPTCPGQNSRSPTSNHSPTSCPPICPGYRWMCLRRFIIFLFILLLCLIFLLVLLDYQGMLPVCPLLPGTSTTSTGPCKTCTNPANGTSMFPSCCCTKPSDGNCTCIPIPSSWAFARFLWEWASVRFSWLSFLVPFVQWFVGLSPTVWLSVMWMMWYWGPSLYNILSPFLPLLPIFFCLWVYI

SEQ ID NO: 58 - protein, 1446 aa, synthetic construct
  REGION 1..1446: note = Recombinant Sequence
MFVFLVLLPLVSSQCVNLRTRTQLPPAYTNSFTRGVYYPDKVFRSSVLHSTQDLFLPFFSNVTWFHAIHFSGTNGTKRFDNPVLPFNDGVYFASIEKSNIIRGWIFGTTLDSKTQSLLIVNNATNVVIKVCEFQFCNDPFLDVYYHKNNKSWMESGVYSSANNCTFEYVSQPFLMDLEGKQGNFKNLREFVFKNIDGYFKIYSKHTPINLVRDLPQGFSVLEPLVDLPIGINITRFQTLLALHRSYLTPGDSSSGLTAGAAAYYVGYLQPRTFLLKYNENGTITDAVDCALDPLSETKCTLKSFTVEKGIYQTSNFRVQPTESIVRFPNITNLCPFGEVFNATRFASVYAWNRKRISNCVADYSVLYNSASFSTFKCYGVSPTKLNDLCFTNVYADSFVIRGDEVRQIAPGQTGNIADYNYKLPDDFTGCVIAWNSNNLDSKVGGNYNYRYRLFRKSNLKPFERDISTEIYQAGSKPCNGVEGFNCYFPLQSYGFQPTNGVGYQPYRVVVLSFELLHAPATVCGPKKSTNLVKNKCVNFNFNGLTGTGVLTESNKKFLPFQQFGRDIADTTDAVRDPQTLEILDITPCSFGGVSVITPGTNTSNQVAVLYQGVNCTEVPVAIHADQLTPTWRVYSTGSNVFQTRAGCLIGAEHVNNSYECDIPIGAGICASYQTQTNSRGSASSVASQSIIAYTMSLGAENSVAYSNNSIAIPTNFTISVTTEILPVSMTKTSVDCTMYICGDSTECSNLLLQYGSFCTQLNRALTGIAVEQDKNTQEVFAQVKQIYKTPPIKDFGGFNFSQILPDPSKPSKRSPIEDLLFNKVTLADAGFIKQYGDCLGDIAARDLICAQKFNGLTVLPPLLTDEMIAQYTSALLAGTITSGWTFGAGPALQIPFPMQMAYRFNGIGVTQNVLYENQKLIANQFNSAIGKIQDSLSSTPSALGKLQNVVNQNAQALNTLVKQLSSNFGAISSVLNDILSRLDPPEAEVQIDRLITGRLQSLQTYVTQQLIRAAEIRASANLAATKMSECVLGQSKRVDFCGKGYHLMSFPQSAPHGVVFLHVTYVPAQEKNFTTAPAICHDGKAHFPREGVFVSNGTHWFVTQRNFYEPQIITTDNTFVSGNCDVVIGIVNNTVYDPLQPELDSFKEELDKYFKNHTSPDVDLGDISGINASVVNIQKEIDRLNEVAKNLNESLIDLQELGKYGSGSGSGSGSGSGSGSMENTTSGFLGPLLVLQAGFFLLTRILTIPQSLDSWWTSLNFLGGAPTCPGQNSRSPTSNHSPTSCPPICPGYRWMCLRRFIIFLFILLLCLIFLLVLLDYQGMLPVCPLLPGTSTTSTGPCKTCTNPANGTSMFPSCCCTKPSDGNCTCIPIPSSWAFARFLWEWASVRFSWLSFLVPFVQWFVGLSPTVWLSVMWMMWYWGPSLYNILSPFLPLLPIFFCLWVYI

SEQ ID NO: 59 - protein, 1445 aa, synthetic construct
  REGION 1..1445: note = Recombinant Sequence
MFVFLVLLPLVSSQCVNLTTRTQLPPAYTNSFTRGVYYPDKVFRSSVLHSTQDLFLPFFSNVTWFHAISGTNGTKRFDNPVLPFNDGVYFASTEKSNIIRGWIFGTTLDSKTQSLLIVNNATNVVIKVCEFQFCNDPFLGVYHKNNKSWMESEFRVYSSANNCTFEYVSQPFLMDLEGKQGNFKNLREFVFKNIDGYFKIYSKHTPINLVRDLPQGFSALEPLVDLPIGINITRFQTLLALHRSYLTPGDSSSGWTAGAAAYYVGYLQPRTFLLKYNENGTITDAVDCALDPLSETKCTLKSFTVEKGIYQTSNFRVQPTESIVRFPNITNLCPFGEVFNATRFASVYAWNRKRISNCVADYSVLYNSASFSTFKCYGVSPTKLNDLCFTNVYADSFVIRGDEVRQIAPGQTGKIADYNYKLPDDFTGCVIAWNSNNLDSKVGGNYNYLYRLFRKSNLKPFERDISTEIYQAGSTPCNGVEGFNCYFPLQSYGFQPTYGVGYQPYRVVVLSFELLHAPATVCGPKKSTNLVKNKCVNFNFNGLTGTGVLTESNKKFLPFQQFGRDIDDTTDAVRDPQTLEILDITPCSFGGVSVITPGTNTSNQVAVLYQGVNCTEVPVAIHADQLTPTWRVYSTGSNVFQTRAGCLIGAEHVNNSYECDIPIGAGICASYQTQTNSHGSASSVASQSIIAYTMSLGAENSVAYSNNSIAIPINFTISVTTEILPVSMTKTSVDCTMYICGDSTECSNLLLQYGSFCTQLNRALTGIAVEQDKNTQEVFAQVKQIYKTPPIKDFGGFNFSQILPDPSKPSKRSPIEDLLFNKVTLADAGFIKQYGDCLGDIAARDLICAQKFNGLTVLPPLLTDEMIAQYTSALLAGTITSGWTFGAGPALQIPFPMQMAYRFNGIGVTQNVLYENQKLIANQFNSAIGKIQDSLSSTPSALGKLQDVVNQNAQALNTLVKQLSSNFGAISSVLNDILARLDPPEAEVQIDRLITGRLQSLQTYVTQQLIRAAEIRASANLAATKMSECVLGQSKRVDFCGKGYHLMSFPQSAPHGVVFLHVTYVPAQEKNFTTAPAICHDGKAHFPREGVFVSNGTHWFVTQRNFYEPQIITTHNTFVSGNCDVVIGIVNNTVYDPLQPELDSFKEELDKYFKNHTSPDVDLGDISGINASVVNIQKEIDRLNEVAKNLNESLIDLQELGKYGSGSGSGSGSGSGSGSMENTTSGFLGPLLVLQAGFFLLTRILTIPQSLDSWWTSLNFLGGAPTCPGQNSRSPTSNHSPTSCPPICPGYRWMCLRRFIIFLFILLLCLIFLLVLLDYQGMLPVCPLLPGTSTTSTGPCKTCTNPANGTSMFPSCCCTKPSDGNCTCIPIPSSWAFARFLWEWASVRFSWLSFLVPFVQWFVGLSPTVWLSVMWMMWYWGPSLYNILSPFLPLLPIFFCLWVYI

SEQ ID NO: 60 - protein, 1445 aa, synthetic construct
  REGION 1..1445: note = Recombinant Sequence
MFVFLVLLPLVSSQCVNLTTRTQLPPAYTNSFTRGVYYPDKVFRSSVLHSTQDLFLPFFSNVTWFHAISGTNGTKRFDNPVLPFNDGVYFASTEKSNIIRGWIFGTTLDSKTQSLLIVNNATNVVIKVCEFQFCNDPFLGVYHKNNKSWMESEFRVYSSANNCTFEYVSQPFLMDLEGKQGNFKNLREFVFKNIDGYFKIYSKHTPINLVRDLPQGFSALEPLVDLPIGINITRFQTLLALHRSYLTPGDSSSGWTAGAAAYYVGYLQPRTFLLKYNENGTITDAVDCALDPLSETKCTLKSFTVEKGIYQTSNFRVQPTESIVRFPNITNLCPFGEVFNATRFASVYAWNRKRISNCVADYSVLYNSASFSTFKCYGVSPTKLNDLCFTNVYADSFVIRGDEVRQIAPGQTGKIADYNYKLPDDFTGCVIAWNSNNLDSKVGGNYNYLYRLFRKSNLKPFERDISTEIYQAGSTPCNGVKGFNCYFPLQPYGFQPTYGVGYQPYRVVVLSFELLHAPATVCGPKKSTNLVKNKCVNFNFNGLTGTGVLTESNKKFLPFQQFGRDIDDTTDAVRDPQTLEILDITPCSFGGVSVITPGTNTSNQVAVLYQGVNCTEVPVAIHADQLTPTWRVYSTGSNVFQTRAGCLIGAEHVNNSYECDIPIGAGICASYQTQTNSHGSASSVASQSIIAYTMSLGAENSVAYSNNSIAIPINFTISVTTEILPVSMTKTSVDCTMYICGDSTECSNLLLQYGSFCTQLNRALTGIAVEQDKNTQEVFAQVKQIYKTPPIKDFGGFNFSQILPDPSKPSKRSPIEDLLFNKVTLADAGFIKQYGDCLGDIAARDLICAQKFNGLTVLPPLLTDEMIAQYTSALLAGTITSGWTFGAGPALQIPFPMQMAYRFNGIGVTQNVLYENQKLIANQFNSAIGKIQDSLSSTPSALGKLQDVVNQNAQALNTLVKQLSSNFGAISSVLNDILARLDPPEAEVQIDRLITGRLQSLQTYVTQQLIRAAEIRASANLAATKMSECVLGQSKRVDFCGKGYHLMSFPQSAPHGVVFLHVTYVPAQEKNFTTAPAICHDGKAHFPREGVFVSNGTHWFVTQRNFYEPQIITTHNTFVSGNCDVVIGIVNNTVYDPLQPELDSFKEELDKYFKNHTSPDVDLGDISGINASVVNIQKEIDRLNEVANNLNESLIDLQELGKYGSGSGSGSGSGSGSGSMENTTSGFLGPLLVLQAGFFLLTRILTIPQSLDSWWTSLNFLGGAPTCPGQNSRSPTSNHSPTSCPPICPGYRWMCLRRFIIFLFILLLCLIFLLVLLDYQGMLPVCPLLPGTSTTSTGPCKTCTNPANGTSMFPSCCCTKPSDGNCTCIPIPSSWAFARFLWEWASVRFSWLSFLVPFVQWFVGLSPTVWLSVMWMMWYWGPSLYNILSPFLPLLPIFFCLWVYI

SEQ ID NO: 61 - protein, 1445 aa, synthetic construct
  REGION 1..1445: note = Recombinant Sequence
MFVFLVLLPLVSSQCVNFTTRTQLPPAYTNSFTRGVYYPDKVFRSSVLHSTQDLFLPFFSNVTWFHAIHVSGTNGTKRFANPVLPFNDGVYFASTEKSNIIRGWIFGTTLDSKTQSLLIVNNATNVVIKVCEFQFCNDPFLGVYYHKNNKSWMESEFRVYSSANNCTFEYVSQPFLMDLEGKQGNFKNLREFVFKNIDGYFKIYSKHTPINLVRGLPQGFSALEPLVDLPIGINITRFQTLHRSYLTPGDSSSGWTAGAAAYYVGYLQPRTFLLKYNENGTITDAVDCALDPLSETKCTLKSFTVEKGIYQTSNFRVQPTESIVRFPNITNLCPFGEVFNATRFASVYAWNRKRISNCVADYSVLYNSASFSTFKCYGVSPTKLNDLCFTNVYADSFVIRGDEVRQIAPGQTGNIADYNYKLPDDFTGCVIAWNSNNLDSKVGGNYNYLYRLFRKSNLKPFERDISTEIYQAGSTPCNGVKGFNCYFPLQSYGFQPTYGVGYQPYRVVVLSFELLHAPATVCGPKKSTNLVKNKCVNFNFNGLTGTGVLTESNKKFLPFQQFGRDIADTTDAVRDPQTLEILDITPCSFGGVSVITPGTNTSNQVAVLYQGVNCTEVPVAIHADQLTPTWRVYSTGSNVFQTRAGCLIGAEHVNNSYECDIPIGAGICASYQTQTNSPGSASSVASQSIIAYTMSLGVENSVAYSNNSIAIPTNFTISVTTEILPVSMTKTSVDCTMYICGDSTECSNLLLQYGSFCTQLNRALTGIAVEQDKNTQEVFAQVKQIYKTPPIKDFGGFNFSQILPDPSKPSKRSPIEDLLFNKVTLADAGFIKQYGDCLGDIAARDLICAQKFNGLTVLPPLLTDEMIAQYTSALLAGTITSGWTFGAGPALQIPFPMQMAYRFNGIGVTQNVLYENQKLIANQFNSAIGKIQDSLSSTPSALGKLQDVVNQNAQALNTLVKQLSSNFGAISSVLNDILSRLDPPEAEVQIDRLITGRLQSLQTYVTQQLIRAAEIRASANLAATKMSECVLGQSKRVDFCGKGYHLMSFPQSAPHGVVFLHVTYVPAQEKNFTTAPAICHDGKAHFPREGVFVSNGTHWFVTQRNFYEPQIITTDNTFVSGNCDVVIGIVNNTVYDPLQPELDSFKEELDKYFKNHTSPDVDLGDISGINASVVNIQKEIDRLNEVAKNLNESLIDLQELGKYGSGSGSGSGSGSGSGSMENTTSGFLGPLLVLQAGFFLLTRILTIPQSLDSWWTSLNFLGGAPTCPGQNSRSPTSNHSPTSCPPICPGYRWMCLRRFIIFLFILLLCLIFLLVLLDYQGMLPVCPLLPGTSTTSTGPCKTCTNPANGTSMFPSCCCTKPSDGNCTCIPIPSSWAFARFLWEWASVRFSWLSFLVPFVQWFVGLSPTVWLSVMWMMWYWGPSLYNILSPFLPLLPIFFCLWVYI

SEQ ID NO: 62 - protein, 1448 aa, synthetic construct
  REGION 1..1448: note = Recombinant Sequence
MFVFLVLLPLVSSQCVNFTNRTQLPSAYTNSFTRGVYYPDKVFRSSVLHSTQDLFLPFFSNVTWFHAIHVSGTNGTKRFDNPVLPFNDGVYFASTEKSNIIRGWIFGTTLDSKTQSLLIVNNATNVVIKVCEFQFCNYPFLGVYYHKNNKSWMESEFRVYSSANNCTFEYVSQPFLMDLEGKQGNFKNLSEFVFKNIDGYFKIYSKHTPINLVRDLPQGFSALEPLVDLPIGINITRFQTLLALHRSYLTPGDSSSGWTAGAAAYYVGYLQPRTFLLKYNENGTITDAVDCALDPLSETKCTLKSFTVEKGIYQTSNFRVQPTESIVRFPNITNLCPFGEVFNATRFASVYAWNRKRISNCVADYSVLYNSASFSTFKCYGVSPTKLNDLCFTNVYADSFVIRGDEVRQIAPGQTGTIADYNYKLPDDFTGCVIAWNSNNLDSKVGGNYNYLYRLFRKSNLKPFERDISTEIYQAGSTPCNGVKGFNCYFPLQSYGFQPTYGVGYQPYRVVVLSFELLHAPATVCGPKKSTNLVKNKCVNFNFNGLTGTGVLTESNKKFLPFQQFGRDIADTTDAVRDPQTLEILDITPCSFGGVSVITPGTNTSNQVAVLYQGVNCTEVPVAIHADQLTPTWRVYSTGSNVFQTRAGCLIGAEYVNNSYECDIPIGAGICASYQTQTNSPGSASSVASQSIIAYTMSLGAENSVAYSNNSIAIPTNFTISVTTEILPVSMTKTSVDCTMYICGDSTECSNLLLQYGSFCTQLNRALTGIAVEQDKNTQEVFAQVKQIYKTPPIKDFGGFNFSQILPDPSKPSKRSPIEDLLFNKVTLADAGFIKQYGDCLGDIAARDLICAQKFNGLTVLPPLLTDEMIAQYTSALLAGTITSGWTFGAGPALQIPFPMQMAYRFNGIGVTQNVLYENQKLIANQFNSAIGKIQDSLSSTPSALGKLQDVVNQNAQALNTLVKQLSSNFGAISSVLNDILSRLDPPEAEVQIDRLITGRLQSLQTYVTQQLIRAAEIRASANLAAIKMSECVLGQSKRVDFCGKGYHLMSFPQSAPHGVVFLHVTYVPAQEKNFTTAPAICHDGKAHFPREGVFVSNGTHWFVTQRNFYEPQIITTDNTFVSGNCDVVIGIVNNTVYDPLQPELDSFKEELDKYFKNHTSPDVDLGDISGINASFVNIQKEIDRLNEVAKNLNESLIDLQELGKYGSGSGSGSGSGSGSGSMENTTSGFLGPLLVLQAGFFLLTRILTIPQSLDSWWTSLNFLGGAPTCPGQNSRSPTSNHSPTSCPPICPGYRWMCLRRFIIFLFILLLCLIFLLVLLDYQGMLPVCPLLPGTSTTSTGPCKTCTNPANGTSMFPSCCCTKPSDGNCTCIPIPSSWAFARFLWEWASVRFSWLSFLVPFVQWFVGLSPTVWLSVMWMMWYWGPSLYNILSPFLPLLPIFFCLWVYI

SEQ ID NO: 63 - protein, 1448 aa, synthetic construct
  REGION 1..1448: note = Recombinant Sequence
MFVFLVLLPLVSSQCVNLTTRTQLPPAYTNSFTRGVYYPDKVFRSSVLHSTQDLFLPFFSNVTWFHAIHVSGTNGTKRFDNPVLPFNDGVYFASIEKSNIIRGWIFGTTLDSKTQSLLIVNNATNVVIKVCEFQFCNDPFLDVYYHKNNKSWMKSEFRVYSSANNCTFEYVSQPFLMDLEGKQGNFKNLREFVFKNIDGYFKIYSKHTPINLVRDLPQGFSALEPLVDLPIGINITRFQTLLALHRSYLTPGDSSSGWTAGAAAYYVGYLQPRTFLLKYNENGTITDAVDCALDPLSETKCTLKSFTVEKGIYQTSNFRVQPTESIVRFPNITNLCPFGEVFNATRFASVYAWNRKRISNCVADYSVLYNSASFSTFKCYGVSPTKLNDLCFTNVYADSFVIRGDEVRQIAPGQTGKIADYNYKLPDDFTGCVIAWNSNNLDSKVGGNYNYRYRLFRKSNLKPFERDISTEIYQAGSTPCNGVQGFNCYFPLQSYGFQPTNGVGYQPYRVVVLSFELLHAPATVCGPKKSTNLVKNKCVNFNFNGLTGTGVLTESNKKFLPFQQFGRDIADTTDAVRDPQTLEILDITPCSFGGVSVITPGTNTSNQVAVLYQGVNCTEVPVAIHADQLTPTWRVYSTGSNVFQTRAGCLIGAEHVNNSYECDIPIGAGICASYQTQTNSRGSASSVASQSIIAYTMSLGAENSVAYSNNSIAIPTNFTISVTTEILPVSMTKTSVDCTMYICGDSTECSNLLLQYGSFCTQLNRALTGIAVEQDKNTQEVFAQVKQIYKTPPIKDFGGFNFSQILPDPSKPSKRSPIEDLLFNKVTLADAGFIKQYGDCLGDIAARDLICAQKFNGLTVLPPLLTDEMIAQYTSALLAGTITSGWTFGAGPALQIPFPMQMAYRFNGIGVTQNVLYENQKLIANQFNSAIGKIQDSLSSTPSALGKLQDVVNQNAQALNTLVKQLSSNFGAISSVLNDILSRLDPPEAEVQIDRLITGRLQSLQTYVTQQLIRAAEIRASANLAATKMSECVLGQSKRVDFCGKGYHLMSFPQSAPHGVVFLHVTYVPAHEKNFTTAPAICHDGKAHFPREGVFVSNGTHWFVTQRNFYEPQIITTDNTFVSGNCDVVIGIVNNTVYDPLQPELDSFKEELDKYFKNHTSPDVDLGDISGINASVVNIQKEIDRLNEVAKNLNESLIDLQELGKYGSGSGSGSGSGSGSGSMENTTSGFLGPLLVLQAGFFLLTRILTIPQSLDSWWTSLNFLGGAPTCPGQNSRSPTSNHSPTSCPPICPGYRWMCLRRFIIFLFILLLCLIFLLVLLDYQGMLPVCPLLPGTSTTSTGPCKTCTNPANGTSMFPSCCCTKPSDGNCTCIPIPSSWAFARFLWEWASVRFSWLSFLVPFVQWFVGLSPTVWLSVMWMMWYWGPSLYNILSPFLPLLPIFFCLWVYI

SEQ ID NO: 64 - protein, 1441 aa, synthetic construct
  REGION 1..1441: note = Recombinant Sequence
MFVFLVLLPLVSSQCVNLTTRTQLPPAYTNSFTRGVYYPDKVFRSSVLHSTQDLFLPFFSNVTWFHAIHVSGTNVIKRFDNPVLPFNDGVYFASTEKSNIIRGWIFGTTLDSKTQSLLIVNNATNVVIKVCEFQFCNDPFLGVYYHKNNKSWMESEFRVYSSANNCTFEYVSQPFLMDLEGKQGNFKNLREFVFKNIDGYFKIYSKHTPINLVRDLPQGFSALEPLVDLPIGINITRFQTLLALHNSSSGWTAGAAAYYVGYLQPRTFLLKYNENGTITDAVDCALDPLSETKCTLKSFTVEKGIYQTSNFRVQPTESIVRFPNITNLCPFGEVFNATRFASVYAWNRKRISNCVADYSVLYNSASFSTFKCYGVSPTKLNDLCFTNVYADSFVIRGDEVRQIAPGQTGKIADYNYKLPDDFTGCVIAWNSNNLDSKVGGNYNYQYRLFRKSNLKPFERDISTEIYQAGSTPCNGVEGFNCYSPLQSYGFQPTNGVGYQPYRVVVLSFELLHAPATVCGPKKSTNLVKNKCVNFNFNGLTGTGVLTESNKKFLPFQQFGRDIADTTDAVRDPQTLEILDITPCSFGGVSVITPGTNTSNQVAVLYQGVNCTEVPVAIHADQLTPTWRVYSTGSNVFQTRAGCLIGAEHVNNSYECDIPIGAGICASYQTQTNSPGSASSVASQSIIAYTMSLGAENSVAYSNNSIAIPTNFTISVTTEILPVSMTKTSVDCTMYICGDSTECSNLLLQYGSFCTQLNRALTGIAVEQDKNTQEVFAQVKQIYKTPPIKDFGGFNFSQILPDPSKPSKRSPIEDLLFNKVTLADAGFIKQYGDCLGDIAARDLICAQKFNGLNVLPPLLTDEMIAQYTSALLAGTITSGWTFGAGPALQIPFPMQMAYRFNGIGVTQNVLYENQKLIANQFNSAIGKIQDSLSSTPSALGKLQDVVNQNAQALNTLVKQLSSNFGAISSVLNDILSRLDPPEAEVQIDRLITGRLQSLQTYVTQQLIRAAEIRASANLAATKMSECVLGQSKRVDFCGKGYHLMSFPQSAPHGVVFLHVTYVPAQEKNFTTAPAICHDGKAHFPREGVFVSNGTHWFVTQRNFYEPQIITTDNTFVSGNCDVVIGIVNNTVYDPLQPELDSFKEELDKYFKNHTSPDVDLGDISGINASVVNIQKEIDRLNEVAKNLNESLIDLQELGKYGSGSGSGSGSGSGSGSMENTTSGFLGPLLVLQAGFFLLTRILTIPQSLDSWWTSLNFLGGAPTCPGQNSRSPTSNHSPTSCPPICPGYRWMCLRRFIIFLFILLLCLIFLLVLLDYQGMLPVCPLLPGTSTTSTGPCKTCTNPANGTSMFPSCCCTKPSDGNCTCIPIPSSWAFARFLWEWASVRFSWLSFLVPFVQWFVGLSPTVWLSVMWMMWYWGPSLYNILSPFLPLLPIFFCLWVYI

SEQ ID NO: 65 - protein, 1440 aa, synthetic construct
  REGION 1..1440: note = Recombinant Sequence
MFVFLVLLPLVSSQCVNLTTRTQLPPAYTNSFTRGVYYPDKVFRSSVLHSTQDLFLPFFSNVTWFHAIHVSGTNVIKRFDNPVLPFNDGVYFASTEKSNIIRGWIFGTTLDSKTQSLLIVNNATNVVIKVCEFQFCNDPFLGVYYHKNNKSWMESEFRVYSSANNCTFEYVSQPFLMDLEGKQGNFKNLREFVFKNIDGYFKIYSKHTPINLVRDLPQGFSALEPLVDLPIGINITRFQTLLALHSSSGWTAGAAAYYVGYLQPRTFLLKYNENGTITDAVDCALDPLSETKCTLKSFTVEKGIYQTSNFRVQPTESIVRFPNITNLCPFGEVFNATRFASVYAWNRKRISNCVADYSVLYNSASFSTFKCYGVSPTKLNDLCFTNVYADSFVIRGDEVRQIAPGQTGKIADYNYKLPDDFTGCVIAWNSNNLDSKVGGNYNYQYRLFRKSNLKPFERDISTEIYQAGSTPCNGVEGFNCYSPLQSYGFQPTNGVGYQPYRVVVLSFELLHAPATVCGPKKSTNLVKNKCVNFNFNGLTGTGVLTESNKKFLPFQQFGRDIADTTDAVRDPQTLEILDITPCSFGGVSVITPGTNTSNQVAVLYQGVNCTEVPVAIHADQLTPTWRVYSTGSNVFQTRAGCLIGAEHVNNSYECDIPIGAGICASYQTQTNSPGSASSVASQSIIAYTMSLGAENSVAYSNNSIAIPTNFTISVTTEILPVSMTKTSVDCTMYICGDSTECSNLLLQYGSFCTQLNRALTGIAVEQDKNTQEVFAQVKQIYKTPPIKDFGGFNFSQILPDPSKPSKRSPIEDLLFNKVTLADAGFIKQYGDCLGDIAARDLICAQKFNGLNVLPPLLTDEMIAQYTSALLAGTITSGWTFGAGPALQIPFPMQMAYRFNGIGVTQNVLYENQKLIANQFNSAIGKIQDSLSSTPSALGKLQDVVNQNAQALNTLVKQLSSNFGAISSVLNDILSRLDPPEAEVQIDRLITGRLQSLQTYVTQQLIRAAEIRASANLAATKMSECVLGQSKRVDFCGKGYHLMSFPQSAPHGVVFLHVTYVPAQEKNFTTAPAICHDGKAHFPREGVFVSNGTHWFVTQRNFYEPQIITTDNTFVSGNCDVVIGIVNNTVYDPLQPELDSFKEELDKYFKNHTSPDVDLGDISGINASVVNIQKEIDRLNEVAKNLNESLIDLQELGKYGSGSGSGSGSGSGSGSMENTTSGFLGPLLVLQAGFFLLTRILTIPQSLDSWWTSLNFLGGAPTCPGQNSRSPTSNHSPTSCPPICPGYRWMCLRRFIIFLFILLLCLIFLLVLLDYQGMLPVCPLLPGTSTTSTGPCKTCTNPANGTSMFPSCCCTKPSDGNCTCIPIPSSWAFARFLWEWASVRFSWLSFLVPFVQWFVGLSPTVWLSVMWMMWYWGPSLYNILSPFLPLLPIFFCLWVYI

SEQ ID NO: 66 - protein, 1448 aa, synthetic construct
  REGION 1..1448: note = Recombinant Sequence
MFVFLVLLPLVSSQCVNLTTRTQLPPAYTNSFTRGVYYPDKVFRSSVLHSTQDLFLPFFSNVTWFHAIHVSGTNGTKRFDNPVLPFNDGVYFASTEKSNIIRGWIFGTTLDSKTQSLLIVNNATNVVIKVCEFQFCNDPFLGVYYHKNNKSLMESEFRVYSSANNCTFEYVSQPFLMDLEGKQGNFKNLREFVFKNIDGYFKIYSKHTPINLVRDLPQGFSALEPLVDLPIGINITRFQTLLALHRSYLTPGDSSSGWTAGAAAYYVGYLQPRTFLLKYNENGTITDAVDCALDPLSETKCTLKSFTVEKGIYQTSNFRVQPTESIVRFPNITNLCPFGEVFNATRFASVYAWNRKRISNCVADYSVLYNSASFSTFKCYGVSPTKLNDLCFTNVYADSFVIRGDEVRQIAPGQTGKIADYNYKLPDDFTGCVIAWNSNNLDSKVGGNYNYLYRLFRKSNLKPFERDISTEIYQAGSTPCNGVKGFNCYFPLQSYGFQPTNGVGYQPYRVVVLSFELLHAPATVCGPKKSTNLVKNKCVNFNFNGLTGTGVLTESNKKFLPFQQFGRDIADTTDAVRDPQTLEILDITPCSFGGVSVITPGTNTSNQVAVLYQGVNCTEVPVAIHADQLTPTWRVYSTGSNVFQTRAGCLIGAEHVNNSYECDIPIGAGICASYQTQTNSPGSASSVASQSIIAYTMSLGAENSVAYSNNSIAIPTNFTISVTTEILPVSMTKTSVDCTMYICGDSTECSNLLLQYGSFCTQLNRALTVIAVEQDKNTQEVFAQVKQIYKTPPIKDFGGFNFSQILPDPSKPSKRSPIEDLLFNKVTLADAGFIKQYGDCLGDIAARDLICAQKFNGLTVLPPLLTDEMIAQYTSALLAGTITSGWTFGAGPALQIPFPMQMAYRFNGIGVTQNVLYENQKLIANQFNSAIGKIQDSLSSTPSALGKLQDVVNQNAQALNTLVKQLSSNFGAISSVLNDILSRLDPPEAEVQIDRLITGRLQSLQTYVTQQLIRAAEIRASANLAATKMSECVLGQSKRVDFCGKGYHLMSFPQSAPHGVVFLHVTYVPAQEKNFTTAPAICHDGKAHFPREGVFVSNGTHWFVTQRNFYEPQIITTDNTFVSGNCDVVIGIVNNTVYDPLQPELDSFKEELDKYFKNHTSPDVDLGDISGINASVVNIQKEIDRLNEVAKNLNESLIDLQELGKYGSGSGSGSGSGSGSGSMENTTSGFLGPLLVLQAGFFLLTRILTIPQSLDSWWTSLNFLGGAPTCPGQNSRSPTSNHSPTSCPPICPGYRWMCLRRFIIFLFILLLCLIFLLVLLDYQGMLPVCPLLPGTSTTSTGPCKTCTNPANGTSMFPSCCCTKPSDGNCTCIPIPSSWAFARFLWEWASVRFSWLSFLVPFVQWFVGLSPTVWLSVMWMMWYWGPSLYNILSPFLPLLPIFFCLWVYI

SEQ ID NO: 67 - protein, 1448 aa, synthetic construct
  REGION 1..1448: note = Recombinant Sequence
MFVFLVLLPLVSSQCVNLTTRTQLPPAYTNSFTRGVYYPDKVFRSSVLHSTQDLFLPFFSNVTWFHAIHVSGTNGTKRFDNPVLPFNDGVYFASTEKSNIIRGWIFGTTLDSKTQSLLIVNNATNVVIKVCEFQFCNDPFLGVYYHKNNKSWMESEFRVYSSANNCTFEYVSQPFLMDLEGKQGNFKNLREFVFKNIDGYFKIYSKHTPINLVRDLPQGFSALEPLVDLPIGINITRFQTLLALHRSYLTPGDSSSGWTAGAAAYYVGYLQPRTFLLKYNENGTITDAVDCALDPLSETKCTLKSFTVEKGIYQTSNFRVQPTESIVRFPNITNLCPFGEVFNATRFASVYAWNRKRISNCVADYSVLYNSASFSTFKCYGVSPTKLNDLCFTNVYADSFVIRGDEVRQIAPGQTGKIADYNYKLPDDFTGCVIAWNSNNLDSKVGGNYNYLYRLFRKSNLKPFERDISTEIYQAGSKPCNGVEGFNCYFPLQSYGFQPTNGVGYQPYRVVVLSFELLHAPATVCGPKKSTNLVKNKCVNFNFNGLTGTGVLTESNKKFLPFQQFGRDIADTTDAVRDPQTLEILDITPCSFGGVSVITPGTNTSNQVAVLYQGVNCTEVPVAIHADQLTPTWRVYSTGSNVFQTRAGCLIGAEHVNNSYECDIPIGAGICASYQTQTNSHGSASSVASQSIIAYTMSLGAENSVAYSNNSIAIPTNFTISVTTEILPVSMAKTSVDCTMYICGDSTECSNLLLQYGSFCTQLNRALTGIAVEQDKNTQEVFAQVKQIYKTPPIKDFGGFNFSQILPDPSKPSKRSPIEDLLFNKVTLADAGFIKQYGDCLGDIAARDLICAQKFNGLTVLPPLLTDEMIAQYTSALLAGTITSGWTFGAGPALQIPFPMQMAYRFNGIGVTQNVLYENQKLIANQFNSAIGKIQDSLSSTPSALGKLQDVVNQNAQALNTLVKQLSSNFGAISSVLNDILSRLDPPEAEVQIDRLITGRLQSLQTYVTQQLIRAAEIRASANLAATKMSECVLGQSKRVDFCGKGYHLMSFPQSAPHGVVFLHVTYVPAQEKNFTTAPAICHDGKAHFPREGVFVSNGTHWFVTQRNFYEPQIITTDNTFVSGNCDVVIGIVNNTVYDPLQPELDSFKEELDKYFKNHTSPDVDLGDISGINASVVNIQKEIDRLNEVAKNLNESLIDLQELGKYGSGSGSGSGSGSGSGSMENTTSGFLGPLLVLQAGFFLLTRILTIPQSLDSWWTSLNFLGGAPTCPGQNSRSPTSNHSPTSCPPICPGYRWMCLRRFIIFLFILLLCLIFLLVLLDYQGMLPVCPLLPGTSTTSTGPCKTCTNPANGTSMFPSCCCTKPSDGNCTCIPIPSSWAFARFLWEWASVRFSWLSFLVPFVQWFVGLSPTVWLSVMWMMWYWGPSLYNILSPFLPLLPIFFCLWVYI

SEQ ID NO: 68 - protein, 1445 aa, synthetic construct
  REGION 1..1445: note = Recombinant Sequence
MFVFLVLLPLVSSQCVNLTTRTQLPPAYTNSFTRGVYYPDKVFRSSVLHSTRDLFLPFFSNVTWFHVISGTNGTKRFDNPVLPFNDGVYFASTEKSNIIRGWIFGTTLDSKTQSLLIVNNATNVVIKVCEFQFCNDPFLGVYHKNNKSWMESEFRVYSSANNCTFEYVSQPFLMDLEGKQGNFKNLREFVFKNIDGYFKIYSKHTPINLVRDLPQGFSALEPLVDLPIGINITRFQTLLALHRSYLTPGDSSSGWTAGAAAYYVGYLQPRTFLLKYNENGTITDAVDCALDPLSETKCTLKSFTVEKGIYQTSNFRVQPTESIVRFPNITNLCPFGEVFNATRFASVYAWNRKRISNCVADYSVLYNSASFSTFKCYGVSPTKLNDLCFTNVYADSFVIRGDEVRQIAPGQTGKIADYNYKLPDDFTGCVIAWNSNNLDSKVGGNYNYLYRLFRKSNLKPFERDISTEIYQAGSTPCNGVKGFNCYFPLQSYGFQPTNGVGYQPYRVVVLSFELLHAPATVCGPKKSTNLVKNKCVNFNFNGLTGTGVLTESNKKFLPFQQFGRDIADTTDAVRDPQTLEILDITPCSFGGVSVITPGTNTSNQVAVLYQGVNCTEVPVAIHADQLTPTWRVYSTGSNVFQTRAGCLIGAEHVNNSYECDIPIGAGICASYQTHTNSPGSASSVASQSIIAYTMSLGAENSVAYSNNSIAIPTNFTISVTTEILPVSMTKTSVDCTMYICGDSTECSNLLLQYGSFCTQLNRALTGIAVEQDKNTQEVFAQVKQIYKTPPIKDFGGFNFSQILPDPSKPSKRSPIEDLLFNKVTLADAGFIKQYGDCLGDIAARDLICAQKFNGLTVLPPLLTDEMIAQYTSALLAGTITSGWTLGAGPALQIPFPMQMAYRFNGIGVTQNVLYENQKLIANQFNSAIGKIQDSLSSTPSALGKLQDVVNQNAQALNTLVKQLSSNFGAISSVLNDILSRLDPPEAEVQIDRLITGRLQSLQTYVTQQLIRAAEIRASANLAATKMSECVLGQSKRVDFCGKGYHLMSFPQSAPHGVVFLHVTYVPAQEKNFTTAPAICHDGKAHFPREGVFVSNGTHWFVTQRNFYEPQIITTDNTFVSGNCDVVIGIVNNTVYDPLQPELDSFKEELDKYFKNHTSPDVDLGDISGINASVVNIQKEIDRLNEVAKNLNESLIDLQELGKYGSGSGSGSGSGSGSGSMENTTSGFLGPLLVLQAGFFLLTRILTIPQSLDSWWTSLNFLGGAPTCPGQNSRSPTSNHSPTSCPPICPGYRWMCLRRFIIFLFILLLCLIFLLVLLDYQGMLPVCPLLPGTSTTSTGPCKTCTNPANGTSMFPSCCCTKPSDGNCTCIPIPSSWAFARFLWEWASVRFSWLSFLVPFVQWFVGLSPTVWLSVMWMMWYWGPSLYNILSPFLPLLPIFFCLWVYI

SEQ ID NO: 69 - protein, 1448 aa, synthetic construct
  REGION 1..1448: note = Recombinant Sequence
MFVFFVLLPLVSSQCVNLTTRTQLPPAYTNSFTRGVYYPDKVFRSSVLHSTQDLFLPFFSNVTWFHAIHVSGTNGTKRFDNPVLPFNDGVYFASIEKSNIIRGWIFGTTLDSKTQSLLIVNNATNVVIKVCEFQFCNDPFLGVYYHKNNKSWMESEFRVYSSANNCTFEYVSQPFLMDLEGKQGNFKNLREFVFKNIDGYFKIYSKHTPINLVRDLPQGFSALEPLVDLPIGINITRFQTLLALHRSYLTPGGSSSGWTAGAAAYYVGYLQPRTFLLKYNENGTITDAVDCALDPLSETKCTLKSFTVEKGIYQTSNFRVQPTESIVRFPNITNLCPFGEVFNATRFASVYAWNRKRISNCVADYSVLYNSASFSTFKCYGVSPTKLNDLCFTNVYADSFVIRGDEVRQIAPGQTGKIADYNYKLPDDFTGCVIAWNSNNLDSKVGGNYNYLYRLFRKSNLKPFERDISTEIYQAGSTPCNGVKGFNCYFPLQSYGFQPTNGVGYQPYRVVVLSFELLHAPATVCGPKKSTNLVKNKCVNFNFNGLTGTGVLTESNKKFLPFQQFGRDIADTTDAVRDPQTLEILDITPCSFGGVSVITPGTNTSNQVAVLYQGVNCTEVPVAIHADQLTPTWRVYSTGSNVFQTRAGCLIGAEHVNNSYECDIPIGAGICASYQTQTNSPGSASSVASQSIIAYTMSLGVENSVAYSNNSIAIPTNFTISVTTEILPVSMTKTSVDCTMYICGDSTECSNLLLQYGSFCTQLNRALTGIAVEQDKNTQEVFAQVKQIYKTPPIKDFGGFNFSQILPDPSKPSKRSPIEDLLFNKVTLADAGFIKQYGDCLGDIAARDLICAQKFNGLTVLPPLLTDEMIAQYTSALLAGTITSGWTFGAGPALQIPFPMQMAYRFNGIGVTQNVLYENQKLIANQFNSAIGKIQDSLSSTPSALGKLQDVVNQNAQALNTLVKQLSSNFGAISSVLNDILSRLDPPEAEVQIDRLITGRLQSLQTYVTQQLIRAAEIRASANLAATKMSECVLGQSKRVDFCGKGYHLMSFPQSAPHGVVFLHVTYVPAQEKNFTTAPAICHDGKAHFPREGVFVSNGTHWFVTQRNFYEPQIITTDNTFVSGNCDVVIGIVNNTVYDPLQPELDSFKEELDKYFKNHTSPDVDLGDISGINASVVNIQKEIDRLNEVAKNLNESLIDLQELGKYGSGSGSGSGSGSGSGSMENTTSGFLGPLLVLQAGFFLLTRILTIPQSLDSWWTSLNFLGGAPTCPGQNSRSPTSNHSPTSCPPICPGYRWMCLRRFIIFLFILLLCLIFLLVLLDYQGMLPVCPLLPGTSTTSTGPCKTCTNPANGTSMFPSCCCTKPSDGNCTCIPIPSSWAFARFLWEWASVRFSWLSFLVPFVQWFVGLSPTVWLSVMWMMWYWGPSLYNILSPFLPLLPIFFCLWVYI

SEQ ID NO: 70 - protein, 1448 aa, synthetic construct
  REGION 1..1448: note = Recombinant Sequence
MFVFLVLLPLVSIQCVNLTTRTQLPPAYTNSFTRGVYYPDKVFRSSVLHSTQDLFLPFFSNVTWFHAIHVSGTNGTKRFDNPVLPFNDGVYFASTEKSNIIRGWIFGTTLDSKTQSLLIVNNATNVVIKVCEFQFCNDPFLGVYYHKNNKSCMESEFRVYSSANNCTFEYVSQPFLMDLEGKQGNFKNLREFVFKNIDGYFKIYSKHTPINLVRDLPQGFSALEPLVDLPIGINITRFQTLLALHRSYLTPGDSSSGWTAGAAAYYVGYLQPRTFLLKYNENGTITDAVDCALDPLSETKCTLKSFTVEKGIYQTSNFRVQPTESIVRFPNITNLCPFGEVFNATRFASVYAWNRKRISNCVADYSVLYNSASFSTFKCYGVSPTKLNDLCFTNVYADSFVIRGDEVRQIAPGQTGKIADYNYKLPDDFTGCVIAWNSNNLDSKVGGNYNYRYRLFRKSNLKPFERDISTEIYQAGSTPCNGVEGFNCYFPLQSYGFQPTNGVGYQPYRVVVLSFELLHAPATVCGPKKSTNLVKNKCVNFNFNGLTGTGVLTESNKKFLPFQQFGRDIADTTDAVRDPQTLEILDITPCSFGGVSVITPGTNTSNQVAVLYQGVNCTEVPVAIHADQLTPTWRVYSTGSNVFQTRAGCLIGAEHVNNSYECDIPIGAGICASYQTQTNSPGSASSVASQSIIAYTMSLGAENSVAYSNNSIAIPTNFTISVTTEILPVSMTKTSVDCTMYICGDSTECSNLLLQYGSFCTQLNRALTGIAVEQDKNTQEVFAQVKQIYKTPPIKDFGGFNFSQILPDPSKPSKRSPIEDLLFNKVTLADAGFIKQYGDCLGDIAARDLICAQKFNGLTVLPPLLTDEMIAQYTSALLAGTITSGWTFGAGPALQIPFPMQMAYRFNGIGVTQNVLYENQKLIANQFNSAIGKIQDSLSSTPSALGKLQDVVNQNAQALNTLVKQLSSNFGAISSVLNDILSRLDPPEAEVQIDRLITGRLQSLQTYVTQQLIRAAEIRASANLAATKMSECVLGQSKRVDFCGKGYHLMSFPQSAPHGVVFLHVTYVPAQEKNFTTAPAICHDGKAHFPREGVFVSNGTHWFVTQRNFYEPQIITTDNTFVSGNCDVVIGIVNNTVYDPLQPELDSFKEELDKYFKNHTSPDVDLGDISGINASVVNIQKEIDRLNEVAKNLNESLIDLQELGKYGSGSGSGSGSGSGSGSMENTTSGFLGPLLVLQAGFFLLTRILTIPQSLDSWWTSLNFLGGAPTCPGQNSRSPTSNHSPTSCPPICPGYRWMCLRRFIIFLFILLLCLIFLLVLLDYQGMLPVCPLLPGTSTTSTGPCKTCTNPANGTSMFPSCCCTKPSDGNCTCIPIPSSWAFARFLWEWASVRFSWLSFLVPFVQWFVGLSPTVWLSVMWMMWYWGPSLYNILSPFLPLLPIFFCLWVYI

SEQ ID NO: 71 - protein, 1447 aa, synthetic construct
  REGION 1..1447: note = Recombinant Sequence
MFVFLVLLPLVSSQCVNLTTRTQLPPAYTNSFTRGVYYPDKVFRSSVLHSTQDLFLPFFSNVTWFHAIHVSGTNGTKRFGNPVLPFNDGVYFASTEKSNIIRGWIFGTTLDSKTQSLLIVNNATNVVIKVCEFQFCNDPFLGVYHKNNKSWMESESRVYSSANNCTFEYVSQPFLMDLEGKQGNFKNLREFVFKNIDGYFKIYSKHTPINLVRDLPQGFSALEPLVDLPIGINITRFQTLLALHRSYLTPGDSSSGWTAGAAAYYVGYLQPRTFLLKYNENGTITDAVDCALDPLSETKCTLKSFTVEKGIYQTSNFRVQPTESIVRFPNITNLCPFGEVFNATRFASVYAWNRKRISNCVADYSVLYNSASFSTFKCYGVSPTKLNDLCFTNVYADSFVIRGDEVRQIAPGQTGKIADYNYKLPDDFTGCVIAWNSNNLDSKVGGNYNYRYRLFRKSNLKPFERDISTEIYQAGSTPCNGVEGFNCYFPLQSYGFQPTNGVGYQPYRVVVLSFELLHAPATVCGPKKSTNLVKNKCVNFNFNGLTGTGVLTESNKKFLPFQQFGRDIADTTDAVRDPQTLEILDITPCSFGGVSVITPGTNTSNQVAVLYQGVNCTEVPVAIHADQLTPTWRVYSTGSNVFQTRAGCLIGAEHVNNSYECDIPIGAGICASYQTQTNSPGSASSVASQSIIAYTMSLGAENSVAYSNNSIAIPTNFTISVTTEILPVSMTKTSVDCTMYICGDSTECSNLLLQYGSFCTQLNRALTGIAVEQDKNTQEVFAQVKQIYKTPPIKDFGGFNFSQILPDPSKPSKRSPIEDLLFNKVTLADAGFIKQYGDCLGDIAARDLICAQKFNGLNVLPPLLTDEMIAQYTSALLAGTITSGWTFGAGPALQIPFPMQMAYRFNGIGVTQNVLYENQKLIANQFNSAIGKIQDSLSSTPSALGKLQHVVNQNAQALNTLVKQLSSNFGAISSVLNDILSRLDPPEAEVQIDRLITGRLQSLQTYVTQQLIRAAEIRASANLAATKMSECVLGQSKRVDFCGKGYHLMSFPQSAPHGVVFLHVTYVPAQEKNFTTAPAICHDGKAHFPREGVFVSNGTHWFVTQRNFYEPQIITTDNTFVSGNCDVVIGIVNNTVYDPLQPELDSFKEELDKYFKNHTSPDVDLGDISGINASVVNIQKEIDRLNEVAKNLNESLIDLQELGKYGSGSGSGSGSGSGSGSMENTTSGFLGPLLVLQAGFFLLTRILTIPQSLDSWWTSLNFLGGAPTCPGQNSRSPTSNHSPTSCPPICPGYRWMCLRRFIIFLFILLLCLIFLLVLLDYQGMLPVCPLLPGTSTTSTGPCKTCTNPANGTSMFPSCCCTKPSDGNCTCIPIPSSWAFARFLWEWASVRFSWLSFLVPFVQWFVGLSPTVWLSVMWMMWYWGPSLYNILSPFLPLLPIFFCLWVYI

SEQ ID NO: 72 - protein, 1448 aa, synthetic construct
  REGION 1..1448: note = Recombinant Sequence
MFVFLVLLPLVSSQCVNLTTRTQLPPAYTNSFTRGVYYPDKVFRSSVLHSTQDLFLPFFSNVTWFHAIHVSGTNGTKRFDNPVLPFNDGVYFASTEKSNIIRGWIFGTTLDSKTQSLLIVNNATNVVIKVCEFQFCNDPFLGVYYHKNNKSWMESEFRVYSSANNCTFEYVSQPFLMDLEGKQGNFKNLREFVFKNIDGYFKIYSKHTPINLVRDLPQGFSALEPLVDLPIGINITRFQTLLALHRSYLTPGDSSSGWTAGAAAYYVGYLQPRTFLLKYNENGTITDAVDCALDPLSETKCTLKSFTVEKGIYQTSNFRVQPTESIVRFPNITNLCPFGEVFNATRFASVYAWNRKRISNCVADYSVLYNSASFSTFKCYGVSPTKLNDLCFTNVYADSFVIRGDEVRQIAPGQTGKIADYNYKLPDDFTGCVIAWNSNNLDSKVGGNYNYLYRLFRKSNLKPFERDISTEIYQAGSTPCNGVKGFNCYFPLQSYGFQPTNGVGYQPYRVVVLSFELLHAPATVCGPKKSTNLVKNKCVNFNFNGLTGTGVLTESNKKFLPFQQFGRDIADTTDAVRDPQTLEILDITPCSFGGVSVITPGTNTSNQVAVLYQGVNCTEVPVAIHADQLTPTWRVYSTGSNVFQTRAGCLIGAEHVNNSYECDIPIGAGICASYQTQTNSPGSASSVASQSIIAYTMSLGAENSVAYSNNSIAIPTNFTISVTTEILPVSMTKTSVDCTMYICGDSTECSNLLLQYGSFCTQLNRALTGIAVEQDKNTQEVFAQVKQIYKTPPIKDFGGFNFSQILPDPSKPSKRSPIEDLLFNKVTLADAGFIKQYGDCLGDIAARDLICAQKFNGLTVLPPLLTDEMIAQYTSALLAGTITSGWTFGAGPALQIPFPMQMAYRFNGIGVTQNVLYENQKLIANQFNSAIGKIQDSLSSTPSALGKLQDVVNQNAQALNTLVKQLSSNFGAISSVLNDILSRLDPPEAEVQIDRLITGRLQSLQTYVTQQLIRAAEIRASANLAATKMSECVLGQSKRVDFCGKGYHLMSFPQSAPHGVVFLHVTYVPAQEKNFTTAPAICHDGKAHFPREGVFVSNGTHWFVTQRNFYEPQIITTDNTFVSGNCDVVIGIVNNTVYDPLQPELDSFKEELDKYFKNHTSPDVDLGDISGINASFVNIQKEIDRLNEVAKNLNESLIDLQELGKYGSGSGSGSGSGSGSGSMENTTSGFLGPLLVLQAGFFLLTRILTIPQSLDSWWTSLNFLGGAPTCPGQNSRSPTSNHSPTSCPPICPGYRWMCLRRFIIFLFILLLCLIFLLVLLDYQGMLPVCPLLPGTSTTSTGPCKTCTNPANGTSMFPSCCCTKPSDGNCTCIPIPSSWAFARFLWEWASVRFSWLSFLVPFVQWFVGLSPTVWLSVMWMMWYWGPSLYNILSPFLPLLPIFFCLWVYI

SEQ ID NO: 73 - protein, 1448 aa, synthetic construct
  REGION 1..1448: note = Recombinant Sequence
MFVFLVLLPLVSSQCVNLTTRTQLPPAYTNSFTRGVYYPDKVFRSSVLHSTQDLFLPFFSNVTWFHAIHVSGTNGTKRFDNPVLPFNDGVYFASTEKSNIIRGWIFGTTLDSKTQSLLIVNNATNVVIKVCEFQFCNDPFLGVYYHKNNKSWMESELRVYSSANNCTFEYVSQPFLMDLEGKQGNFKNLREFVFKNIDGYFKIYSKHTPINLVRDLPQGFSALEPLVDLPIGINITRFQTLLALHRSYLTPGDSSSGWTAGAAAYYVGYLQPRTFLLKYNENGTITDAVDCALDPLSETKCTLKSFTVEKGIYQTSNFRVQPTESIVRFPNITNLCPFGEVFNATRFASVYAWNRKRISNCVADYSFLYNSASFSTFKCYGVSPTKLNDLCFTNVYADSFVIRGDEVRQIAPGQTGKIADYNYKLPDDFTGCVIAWNSNNLDSKVGGNYNYLYRLFRKSNLKPFERDISTEIYQAGSTPCNGVEGFNCYFPLQSYGFQPTNGVGYQPYRVVVLSFELLHAPATVCGPKKSTNLVKNKCVNFNFNGLTGTGVLTESNKKFLPFQQFGRDIADTTDAVRDPQTLEILDITPCSFGGVSVITPGTNTSNQVAVLYHGVNCTEVPVAIHADQLTPTWRVYSTGSNVFQTRAGCLIGAEHVNNSYECDIPIGAGICASYQTQTNSRGSASSVASQSIIAYTMSLGAENSVAYSNNSIAIPTNFTISVTTEILPVSMTKTSVDCTMYICGDSTECSNLLLQYGSFCTQLNRALTGIAVEQDKNTQEVFAQVKQIYKTPPIKDFGGFNFSQILPDPSKPSKRSPIEDLLFNKVTLADAGFIKQYGDCLGDIAARDLICAQKFNGLTVLPPLLTDEMIAQYTSALLAGTITSGWTFGAGPALQIPFPMQMAYRFNGIGVTQNVLYENQKLIANQFNSAIGKIQDSLSSTPSALGKLQDVVNQNAQALNTLVKQLSSNFGAISSVLNDILSRLDPPEAEVQIDRLITGRLQSLQTYVTQQLIRAAEIRASANLAATKMSECVLGQSKRVDFCGKGYHLMSFPQSAPHGVVFLHVTYVPAQEKNFTTAPAICHDGKAHFPREGVFVSNGTHWFVTQRNFYEPQIITTDNTFVSGNCDVVIGIVNNTVYDPLQPELDSFKEELDKYFKNHTSPDVDLGDISGINASVVNIQKEIDRLNEVAKNLNESLIDLQELGKYGSGSGSGSGSGSGSGSMENTTSGFLGPLLVLQAGFFLLTRILTIPQSLDSWWTSLNFLGGAPTCPGQNSRSPTSNHSPTSCPPICPGYRWMCLRRFIIFLFILLLCLIFLLVLLDYQGMLPVCPLLPGTSTTSTGPCKTCTNPANGTSMFPSCCCTKPSDGNCTCIPIPSSWAFARFLWEWASVRFSWLSFLVPFVQWFVGLSPTVWLSVMWMMWYWGPSLYNILSPFLPLLPIFFCLWVYI

SEQ ID NO: 74 - protein, 1448 aa, synthetic construct
  REGION 1..1448: note = Recombinant Sequence
MFVFFVLLPLVSSQCVNLTTRTQLPPAYTNSFTRGVYYPDKVFRSSVLHSTQDLFLPFFSNVTWFHAIHVSGTNGTKRFDNPVLPFNDGVYFASIEKSNIIRGWIFGTTLDSKTQSLLIVNNATNVVIKVCEFQFCNDPFLGVYYHKNNKSWMESEFRVYSSANNCTFEYVSQPFLMDLEGKQGNFKNLREFVFKNIDGYFKIYSKHTPINLVRDLPQGFSALEPLVDLPIGINITRFQTLLALHRSYLTPGGSSSGWTAGAAAYYVGYLQPRTFLLKYNENGTITDAVDCALDPLSETKCTLKSFTVEKGIYQTSNFRVQPTESIVRFPNITNLCPFGEVFNATRFASVYAWNRKRISNCVADYSVLYNSASFSTFKCYGVSPTKLNDLCFTNVYADSFVIRGDEVRQIAPGQTGKIADYNYKLPDDFTGCVIAWNSNNLDSKVGGNYNYLYRLFRKSNLKPFERDISTEIYQAGNTPCNGVEGFNCYFPLQSYGFQPTNGVGYQPYRVVVLSFELLHAPATVCGPKKSTNLVKNKCVNFNFNGLTGTGVLTESNKKFLPFQQFGRDIADTTDAVRDPQTLEILDITPCSFGGVSVITPGTNTSNQVAVLYQGVNCTEVPVAIHADQLTPTWRVYSTGSNVFQTRAGCLIGAEHVNNSYECDIPIGAGICASYQTQTNSPGSASSVASQSIIAYTMSLGAENSVAYSNNSIAIPTNFTISVTTEILPVSMTKTSVDCTMYICGDSTECSNLLLQYGSFCTQLNRALTGIAVEQDKNTQEVFAQVKQIYKTPPIKDFGGFNFSQILPDPSKPSKRSPIEDLLFNKVTLADAGFIKQYGDCLGDIAARDLICAQKFNGLTVLPPLLTDEMIAQYTSALLAGTITSGWTFGAGPALQIPFPMQMAYRFNGIGVTQNVLYENQKLIANQFNSAIGKIQDSLSSTPSALGKLQDVVNQNARALNTLVKQLSSNFGAISSVLNDILSRLDPPEAEVQIDRLITGRLQSLQTYVTQQLIRAAEIRASANLAATKMSECVLGQSKRVDFCGKGYHLMSFPQSAPHGVVFLHVTYVPAQEKNFTTAPAICHDGKAHFPREGVFVSNGTHWFVTQRNFYEPQIITTDNTFVSGNCDVVIGIVNNTVYDPLQPELDSFKEELDKYFKNHTSPDVDLGDISGINASVVNIQKEIDRLNEVAKNLNESLIDLQELGKYGSGSGSGSGSGSGSGSMENTTSGFLGPLLVLQAGFFLLTRILTIPQSLDSWWTSLNFLGGAPTCPGQNSRSPTSNHSPTSCPPICPGYRWMCLRRFIIFLFILLLCLIFLLVLLDYQGMLPVCPLLPGTSTTSTGPCKTCTNPANGTSMFPSCCCTKPSDGNCTCIPIPSSWAFARFLWEWASVRFSWLSFLVPFVQWFVGLSPTVWLSVMWMMWYWGPSLYNILSPFLPLLPIFFCLWVYI

SEQ ID NO: 75 - protein, 1443 aa, synthetic construct
  REGION 1..1443: note = Recombinant Sequence
MFVFLVLLPLVSSQCVNLTTRTQLPPAYTNSFTRGVYYPDKVFRSSVLHSTQDLFLPFFSNVTWFHAIHVSGTNGTKRFDNPVLPFNDGVYFASTEKSNIIRGWIFGTTLDSKTQSLLIVNNATNVVIKVCEFQFCNDPFYYHKNNKSWMESEFRVYSSANNCTFEYVSQPFLMDLEGKQGNFKNLREFVFKNIDGYFKIYSKHTPINLVRDLPQGFSALEPLVDLPIGINITRFQTLLHRSYLTPGDSSSGWTAGAAACYVGYLQPRTFLLKYNENGTITDAVDCALDPLSETKCTLKSFTVEKGIYQTSNFRVQPTESIVRFPNITNLCPFGEVFNATRFASVYAWNRKRISNCVADYSVLYNSASFSTFKCYGVSPTKLNDLCFTNVYADSFVIRGDEVRQIAPGQTGKIADYNYKLPDDFTGCVIAWNSNNLDSKVGGNYNYLYRLFRKSNLKPFERDISTEIYQAGSTPCNGVKGFNCYFPLQSYGFQPTYGVGYQPYRVVVLSFELLHAPATVCGPKKSTNLVKNKCVNFNFNGLTGTGVLTESNKKFLPFQQFGRDIADTTDAVRDPQTLEILDITPCSFGGVSVITPGTNTSNQVAVLYQGVNCTEVPVAIHADQLTPTWRVYSTGSNVFQTRAGCLIGAEHVNNSYECDIPIGAGICASYQTQTNSHGSASSVASQSIIAYTMSLGAENSVAYSNNSIAIPTNFTISVTTEILPVSMTKTSVDCTMYICGDSTECSNLLLQYGSFCTQLNRALTGIAVEQDKNTQEVFAQVKQIYKTPPIKDFGGFNFSQILPDPSKPSKRSPIEDLLFNKVTLADAGFIKQYGDCLGDIAARDLICAQKFNGLTVLPPLLTDEMIAQYTSALLAGTITSGWTFGAGPALQIPFPMQMAYRFNGIGVTQNVLYENQKLIANQFNSAIGKIQDSLSSTPSALGKLQDVVNQNAQALNTLVKQLSSNFGAISSVLNDILSRLDPPEAEVQIDRLITGRLQSLQTYVTQQLIRAAEIRASANLAATKMSECVLGQSKRVDFCGKGYHLMSFPQSAPHGVVFLHVTYVPAQEKNFTTAPAICHDGKAHFPRKGVFVSNGTYWFVTQRNFYEPQIITTDNTFVSGNCDVVIGIVNNTVYDPLQPELDSFKEELDKYFKNHTSPDVDLGDISGINASFVNIQKEIDRLNEVAKNLNESLIDLQELGKYGSGSGSGSGSGSGSGSMENTTSGFLGPLLVLQAGFFLLTRILTIPQSLDSWWTSLNFLGGAPTCPGQNSRSPTSNHSPTSCPPICPGYRWMCLRRFIIFLFILLLCLIFLLVLLDYQGMLPVCPLLPGTSTTSTGPCKTCTNPANGTSMFPSCCCTKPSDGNCTCIPIPSSWAFARFLWEWASVRFSWLSFLVPFVQWFVGLSPTVWLSVMWMMWYWGPSLYNILSPFLPLLPIFFCLWVYI

SEQ ID NO: 76 - protein, 1448 aa, synthetic construct
  REGION 1..1448: note = Recombinant Sequence
MFVFLVLLPLVSSQCVNFTTRTQLPPAYTNSFTRGVYYPDKVFRSSVLHSTQDLFLPFFSNVTWFHAIHVSGTNGTKRFDNPVLPFNDGVYFASTEKSNIIRGWIFGTTLDSKTQSLLIVNNATNVVIKVCEFQFCNDPFLGVYYHKNNKSWMESEFRVYSSANNCTFEYVSQPFLMDLEGKQGNFKNLREFVFKNIDGYFKIYSKHTPINLVRDLPQGFSALEPLVDLPIGINITRFQTLLALHRSYLTPGDSSSGWTAGAAAYYVGYLQPRTFLLKYNENGTITDAVDCALDPLSETKCTLKSFTVEKGIYQTSNFRVQPTESIVRFPNITNLCPFGEVFNATRFASVYAWNRKRISNCVADYSVLYNSASFSTFKCYGVSPTKLNDLCFTNVYADSFVIRGDEVRQIAPGQTGKIADYNYKLPDDFTGCVIAWNSNNLDSKVGGNYNYRYRLFRKSNLKPFERDISTEIYQAGSTPCNGVEGFNCYFPLQSYGFQPTYGVGYQPYRVVVLSFELLHAPATVCGPKKSTNLVKNKCVNFNFNGLTGTGVLTESNKKFLPFQQFGRDIADTTDAVRDPQTLEILDITPCSFGGVSVITPGTNTSNQVAVLYQGVNCTEVPVAIHADQLTPTWRVYSTGSNVFQTRAGCLIGVEYVNNSYECDIPIGAGICASYQTQTNSPGSASSVASQSIIAYTMSLGAENSVAYSNNSIAIPTNFTISVTTEILPVSMTKTSVDCTMYICGDSTECSNLLLQYGSFCTQLNRALTGIAVEQDKNTQEVFAQVKQIYKTPPIKYFGGFNFSQILPDPSKPSKRSPIEDLLFNKVTLADAGFIKQYGDCLGDIAARDLICAQKFNGLTVLPPLLTDEMIAQYTSALLAGTITSGWTFGAGPALQIPFPMQMAYRFNGIGVTQNVLYENQKLIANQFNSAIGKIQDSLSSTPSALGKLQDVVNQNAQALNTLVKQLSSNFGAISSVLNDILSRLDPPEAEVQIDRLITGRLQSLQTYVTQQLIRAAEIRASANLAATKMSECVLGQSKRVDFCGKGYHLMSFPQSAPHGVVFLHVTYVPAQEKNFTTAPAICHDGKAHFPREGVFVSNGTHWFVTQRNFYEPQIITTDNTFVSGNCDVVIGIVNNTVYDPLQPELDSFKEELDKYFKNHTSPDVDLGDISGINASVVNIQKEIDRLNEVAKNLNESLIDLQELGKYGSGSGSGSGSGSGSGSMENTTSGFLGPLLVLQAGFFLLTRILTIPQSLDSWWTSLNFLGGAPTCPGQNSRSPTSNHSPTSCPPICPGYRWMCLRRFIIFLFILLLCLIFLLVLLDYQGMLPVCPLLPGTSTTSTGPCKTCTNPANGTSMFPSCCCTKPSDGNCTCIPIPSSWAFARFLWEWASVRFSWLSFLVPFVQWFVGLSPTVWLSVMWMMWYWGPSLYNILSPFLPLLPIFFCLWVYI

SEQ ID NO: 77 - protein, 1448 aa, synthetic construct
  REGION 1..1448: note = Recombinant Sequence
MFVFLVLLPLVSSQCVNLTTRTQLPPAYTNSFTRGVYYPDKVFRSSVLHSTQDLFLPFFSNVTWFHAIHVSGTNGTKRFDNPVLPFNDGVYFASTEKSNIIRGWIFGTTLDSKTQSLLIVNNATNVVIKVCEFQFCNDPFLGVYYHKNNKSWMESEFRVYSSANNCTFEYVSQPFLMDLEGKQGNFKNLREFVFKNIDGYFKIYSKHTPINLVRDLPQGFSALEPLVDLPIGINITRFQTLLALHRSYLTPGDSSSGWTAGAAAYYVGYLQPRTFLLKYNENGTITDAVDCALDPLSETKCTLKSFTVEKGIYQTSNFRVQPTESIVRFPNITNLCPFGEVFNATRFASVYAWNRKRISNCVADYSVLYNSASFSTFKCYGVSPTKLNDLCFTNVYADSFVIRGDEVRQIAPGQTGKIADYNYKLPDDFTGCVIAWNSNNLDSKVGGNYNYLYRLFRKSNLKPFERDISTEIYQAGSTPCNGVEGFNCYFPLQSYGFQPTTGVGYQPYRVVVLSFELLHAPATVCGPKKSTNLVKNKCVNFNFNGLTGTGVLTESNKKFLPFQQFGRDIADTTDAVRDPQTLEILDITPCSFGGVSVITPGTNTSNQVAVLYQDVNCTEVPVAIHADQLTPTWRVYSTGSNVFQTRAGCLIGAEHVNNSYECDIPIGAGICASYQTQTNSPGSASSVASQSIIAYTMSLGAENSVAYSNNSIAIPTNFTISVTTEILPVSMTKTSVDCTMYICGDSTECSNLLLQYGSFCTQLNRALTGIAVEQDKNTQEVFAQVKQIYKTPPIKDFGGFNFSQILPDPSKPSKRSPIEDLLFNKVTLADAGFIKQYGDCLGDIAARDLICAQKFNGLTVLPPLLTDEMIAQYTSALLAGTITSGWTFGAGPALQIPFPMQMAYRFNGIGVTQNVLYENQKLIANQFNSAIGKIQDSLSSTPSALGKLQDVVNQNAQALNTLVKQLSSNFGAISSVLNDILSRLDPPEAEVQIDRLITGRLQSLQTYVTQQLIRAAEIRASANLAATKMSECVLGQSKRVDFCGKGYHLMSFPQSAPHGVVFLHVTYVPAQEKNFTTAPAICHDGKAHFPREGVFVSNGTHWFVTQRNFYEPQIITTDNTFVSGNCDVVIGIVNNTVYDPLQPELDSFKEELDKYFKNHTSPDVDLGDISGINASVVNIQKEIDRLNEVAKNLNESLIDLQELGKYGSGSGSGSGSGSGSGSMENTTSGFLGPLLVLQAGFFLLTRILTIPQSLDSWWTSLNFLGGAPTCPGQNSRSPTSNHSPTSCPPICPGYRWMCLRRFIIFLFILLLCLIFLLVLLDYQGMLPVCPLLPGTSTTSTGPCKTCTNPANGTSMFPSCCCTKPSDGNCTCIPIPSSWAFARFLWEWASVRFSWLSFLVPFVQWFVGLSPTVWLSVMWMMWYWGPSLYNILSPFLPLLPIFFCLWVYI

SEQ ID NO: 78 - protein, 1448 aa, synthetic construct
  REGION 1..1448: note = Recombinant Sequence
MFVFFVLLPLVSSQCVNLTTRTQLPPAYTNSFTRGVYYPDKVFRSSVLHSTQDLFLPFFSNVTWFHAIHVSGTNGTKRFDNPVLPFNDGVYFASIEKSNIIRGWIFGTTLDSKTQSLLIVNNATNVVIKVCEFQFCNDPFLGVYYHKNNKSWMESEFRVYSSANNCTFEYVSQPFLMDLEGKQGNFKNLREFVFKNIDGYFKIYSKHTPINLVRDLPQGFSALEPLVDLPIGINITRFQTLLALHRSYLTPGGSSSGWTAGAAAYYVGYLQPRTFLLKYNENGTITDAVDCALDPLSETKCTLKSFTVEKGIYQTSNFRVQPTESIVRFPNITNLCPFGEVFNATRFASVYAWNRKRISNCVADYSVLYNSASFSTFKCYGVSPTKLNDLCFTNVYADSFVIRGDEVRQIAPGQTGKIADYNYKLPDDFTGCVIAWNSNNLDSKVGGNYNYLYRLFRKSNLKPFERDISTEIYQAGSTPCNGVEGFNCYFPLQSYGFQPTNGVGYQPYRVVVLSFELLHAPATVCGPKKSTNLVKNKCVNFNFNGLTGTGVLTESNKKFLPFQQFGRDIADTTDAVRDPQTLEILDITPCSFGGVSVITPGTNTSNQVAVLYQGVNCTEVPVAIHADQLTPTWRVYSTGSNVFQTRAGCLIGAEHVNNSYECDIPIGAGICASYQTQTNSPGSASSVASQSIIAYTMSLGVENSVAYSNNSIAIPTNFTISVTTEILPVSMTKTSVDCTMYICGDSTECSNLLLQYGSFCTQLNRALTGIAVEQDKNTQEVFAQVKQIYKTPPIKDFGGFNFSQILPDPSKPSKRSPIEDLLFNKVTLADAGFIKQYGDCLGDIAARDLICAQKFNGLTVLPPLLTDEMIAQYTSALLAGTITSGWTFGAGPALQIPFPMQMAYRFNGIGVTQNVLYENQKLIANQFNSAIGKIQDSLSSTPSALGKLQDVVNQNAQALNTLVKQLSSNFGAISSVLNDILSRLDPPEAEVQIDRLITGRLQSLQTYVTQQLIRAAEIRASANLAATKMSECVLGQSKRVDFCGKGYHLMSFPQSAPHGVVFLHVTYVPAQEKNFTTAPAICHDGKAHFPREGVFVSNGTHWFVTQRNFYEPQIITTDNTFVSGNCDVVIGIVNNTVYDPLQPELDSFKEELDKYFKNHTSPDVDLGDISGINASVVNIQKEIDRLNEVAKNLNESLIDLQELGKYGSGSGSGSGSGSGSGSMENTTSGFLGPLLVLQAGFFLLTRILTIPQSLDSWWTSLNFLGGAPTCPGQNSRSPTSNHSPTSCPPICPGYRWMCLRRFIIFLFILLLCLIFLLVLLDYQGMLPVCPLLPGTSTTSTGPCKTCTNPANGTSMFPSCCCTKPSDGNCTCIPIPSSWAFARFLWEWASVRFSWLSFLVPFVQWFVGLSPTVWLSVMWMMWYWGPSLYNILSPFLPLLPIFFCLWVYI

SEQ ID NO: 79 - protein, 1448 aa, synthetic construct
  REGION 1..1448: note = Recombinant Sequence
MFVFLVLLPLVSSQCVNLTTRTQLPPAYTNSFTRGVYYPDKVFRSSVLHSTQDLFLPFFSNVTWFHAIHVSGTNGTKRFDNPVLPFNDGVYFASTEKSNIIRGWIFGTTLDSKTQSLLIVNNATNVVIKVCEFQFCNDPFLSVYYHKNNKSWMESEFRVYSSANNCTFEYVSQPFLMDLVGKQGNFKNLREFVFKNIDGYFKIYSKHTPINLVRDLPQGFSALEPLVDLPIGINITRFQTLLALHRSYLTPGDSSSGWTAGAAAYYVGYLQPRTFLLKYNENGTITDAVDCALDPLSETKCTLKSFTVEKGIYQTSNFRVQPTESIVRFPNITNLCPFGEVFNATRFASVYAWNRKRISNCVADYSVLYNSASFSTFKCYGVSPTKLNDLCFTNVYADSFVIRGDEVRQIAPGQTGKIADYNYKLPDDFTGCVIAWNSNNLDSKVGGNYNYLYRLFRKSNLKPFERDISTEIYQAGSTPCNGVEGFNCYFPLQSYGFQPTNGVGYQPYRVVVLSFELLHAPATVCGPKKSTNLVKNKCVNFNFNGLTGTGVLTESNKKFLPFQQFGRDIADTTDAVRDPQTLEILDITPCSFGGVSVITPGTNTSNQVAVLYQGVNCTEVPVAIHADQLTPTWRVYSTGSNVFQTRAGCLIGAEHVNNSYECDIPIGAGICASYQTHTNSPGSASSVASQSIIAYTMSLGAENSVAYSNNSIAIPTNFTISVTTEILPVSMTKTSVDCTMYICGDSTECSNLLLQYGSFCTQLNRALTGIAVEQDKNTQEVFAQVKQIYKTPPIKDFGGFNFSQILPDPSKPSKRSPIEDLLFNKVTLADAGFIKQYGDCLGDIAARDLICAQKFNGLTVLPPLLTDEMIAQYTSALLAGTITSGWTFGAGPALQIPFPMQMAYRFNGIGVTQNVLYENQKLIANQFNSAIGKIQDSLSSTPSALGKLQDVVNQNAQALNTLVKQLSSNFGAISSVLNDILSRLDPPEAEVQIDRLITGRLQSLQTYVTQQLIRAAEIRASANLAATKMSECVLGQSKRVDFCGKGYHLMSFPQSAPHGVVFLHVTYVPAQEKNFTTAPAICHDGKAHFPREGVFVSNGTHWFVTQRNFYEPQIITTDNTFVSGNCDVVIGIVNNTVYDPLQPELDSFKEELDKYFKNHTSPDVDLGDISGINASVVNIQKEIDRLNEVAKNLNESLIDLQELGKYGSGSGSGSGSGSGSGSMENTTSGFLGPLLVLQAGFFLLTRILTIPQSLDSWWTSLNFLGGAPTCPGQNSRSPTSNHSPTSCPPICPGYRWMCLRRFIIFLFILLLCLIFLLVLLDYQGMLPVCPLLPGTSTTSTGPCKTCTNPANGTSMFPSCCCTKPSDGNCTCIPIPSSWAFARFLWEWASVRFSWLSFLVPFVQWFVGLSPTVWLSVMWMMWYWGPSLYNILSPFLPLLPIFFCLWVYI

SEQ ID NO: 80 - protein, 1448 aa, synthetic construct
  REGION 1..1448: note = Recombinant Sequence
MFVFLVLLPLVSSQCVNLTTRTQLPPAYTNSFTRGVYYPDKVFRSSVLHSTQDLFLPFFSNVTWFHAIHVSGTNGTKRFDNPVLPFNDGVYFASTEKSNIIRGWIFGTTLDSKTQSLLIVNNATNVVIKVCEFQFCNDPFLGVYYHKNNKSWMESEFRVYSSANNCTFEYVSQPFLMDLEGKQGNFKNLREFVFKNIDGYFKIYSKHTPINLVRDLPQGFSALEPLVDLPIGINITRFQTLLALHRSYLTPGDSSSGWTAGAAAYYVGYLQPRTFLLKYNENGTITDAVDCALDPLSETKCTLKSFTVEKGIYQTSNFRVQPTESIVRFPNITNLCPFGEVFNATRFASVYAWNRKRISNCVADYSVLYNSASFSTFKCYGVSPTKLNDLCFTNVYADSFVIRGDEVRQIAPGQTGKIADYNYKLPDDFTGCVIAWNSNNLDSKVGGNYNYLYRLFRKSNLKPFERDISTEIYQAGSTPCNGVKGFNCYFPLQPYGFQPTYGVGYQPYRVVVLSFELLHAPATVCGPKKSTNLVKNKCVNFNFNGLTGTGVLTESNKKFLPFQQFGRDIADTTDAVRDPQTLEILDITPCSFGGVSVITPGTNTSNQVAVLYQGVNCTEVPVAIHADQLTPTWRVYSTGSNVFQTRAGCLIGAEHVNNSYECDIPIGAGICASYQTQTNSHGSASSVASQSIIAYTMSLGAENSVAYSNNSIAIPTNFTISVTTEILPVSMTKTSVDCTMYICGDSTECSNLLLQYGSFCTQLNRALTGIAVEQDKNTQEVFAQVKQIYKTPPIKDFGGFNFSQILPDPSKPSKRSPIEDLLFNKVTLADAGFIKQYGDCLGDIAARDLICAQKFNGLTVLPPLLTDEMIAQYTSALLAGTITSGWTFGAGPALQIPFPMQMAYRFNGIGVTQNVLYENQKLIANQFNSAIGKIQDSLSSTPSALGKLQDVVNQNAQALNTLVKQLSSNFGAISSVLNDILSRLDPPEAEVQIDRLITGRLQSLQTYVTQQLIRAAEIRASANLAATKMSECVLGQSKRVDFCGKGYHLMSFPQSAPHGVVFLHVTYVPAQEKNFTTAPAICHDGKAHFPREGVFVSNGTHWFVTQRNFYKPQIITTDNTFVSGNCDVVIGIVNNTVYDPLQPELDSFKEELDKYFKNHTSPDVDLGDISGINASVVNIQKEIDRLNEVAKNLNESLIDLQELGKYGSGSGSGSGSGSGSGSMENTTSGFLGPLLVLQAGFFLLTRILTIPQSLDSWWTSLNFLGGAPTCPGQNSRSPTSNHSPTSCPPICPGYRWMCLRRFIIFLFILLLCLIFLLVLLDYQGMLPVCPLLPGTSTTSTGPCKTCTNPANGTSMFPSCCCTKPSDGNCTCIPIPSSWAFARFLWEWASVRFSWLSFLVPFVQWFVGLSPTVWLSVMWMMWYWGPSLYNILSPFLPLLPIFFCLWVYI

SEQ ID NO: 81 - protein, 1447 aa, synthetic construct
  REGION 1..1447: note = Recombinant Sequence
MFVFLVLLPLVSSQCVNLTTRTQLPPAYTNSFTRGVYYPDKVFRSSVLHSTQDLFLPFFSNVTWFDAIHVSGTNGTKRFDNPVLPFNDGVYFASTEKSNIIRGWIFGTTLDSKTQSLLIVNNATNVVIKVCEFQFCNDPFLVVYHKNNKSWMESEFRVYSSANNCTFEYVSQPFLMDLEGKQGNFKNLREFVFKNIDGYFKIYSKHTPINLVRGLPQGFSALEPLVDLPIGINITRFQTLLALHRSYLTPGDSSSGWTAGAAAYYVGYLQPRTFLLKYNENGTITDAVDCALDPLSETKCTLKSFTVEKGIYQTSNFRVQPTESIVRFPNITNLCPFGEVFNATRFASVYAWNRKRISNCVADYSVLYNSASFSTFKCYGVSPTKLNDLCFTNVYADSFVIRGDEVRQIAPGQTGKIADYNYKLPDDFTGCVIAWNSNNLDSKVGGNYNYLYRLFRKSNLKPFERDISTEIYQAGSTPCNGAEGFNCYFPLQSYGFQPTNGVGYQPYRVVVLSFELLHAPATVCGPKKSTNLVKNKCVNFNFNGLTGTGVLTESNKKFLPFQQFGRDIADTTDAVRDPQTLEILDITPCSFGGVSVITPGTNTSNQVAVLYQDVNCTEVPVAIHADQLTPTWRVYSTGSNVFQTRAGCLIGAEYVNNSYECDIPIGASICASYQTQTNSPGSASSVASQSIIAYTMSLGAENSVAYSNNSIAIPTNFTISVTTEILPVSMTKTSVDCTMYICGDSTECSNLLLQYGSFCTQLNRALTGIAVEQDKNTQEVFAQVKQIYKTPPIKDFGGFNFSQILPDPSKPSKRSPIEDLLFNKVTLADAGFIKQYGDCLGDIAARDLICAQKFNGLTVLPPLLTDEMIAQYTSALLAGTITSGWTFGAGPALQIPFPMQMAYRFNGIGVTQNVLYENQKLIANQFNSAIGKIQDSLSSTPSALGKLRDVVNQNAQALNTLVKQLSSNFGAISSVLNDILSRLDPPEAEVQIDRLITGRLQSLQTYVTQQLIRAAEIRASANLAATKMSECVLGQSKRVDFCGKGYHLMSFPQSAPHGVVFLHVTYVPAQEKNFTTAPAICHDGKDHFPREGVFVSNGTHWFVTQRNFYEPQIITTDNTFVSGNCDVVIGIVNNTVYDPLQPELDSFKEELDKYFKNHTSPDVDLGDISGINASVVNIQKEIDRLNEVAKNLNESLIDLQELGKYGSGSGSGSGSGSGSGSMENTTSGFLGPLLVLQAGFFLLTRILTIPQSLDSWWTSLNFLGGAPTCPGQNSRSPTSNHSPTSCPPICPGYRWMCLRRFIIFLFILLLCLIFLLVLLDYQGMLPVCPLLPGTSTTSTGPCKTCTNPANGTSMFPSCCCTKPSDGNCTCIPIPSSWAFARFLWEWASVRFSWLSFLVPFVQWFVGLSPTVWLSVMWMMWYWGPSLYNILSPFLPLLPIFFCLWVYI

SEQ ID NO: 82 - protein, 1448 aa, synthetic construct
  REGION 1..1448: note = Recombinant Sequence
MFVFLVLLPLVSSQCVNLTTRTQLPPAYTNSFTRGVYYPDKVFRSSVLHSTQDLFLPFFSNVTWFHAIHVSGTNGTKRFDNPVLPFNDGVYFASTEKSNIIRGWIFGTTLDSKTQSLLIVNNATNVVIKVCEFQFCNDPFLGVYYHKNNKSWMESEFRVYSSANNCTFEYVSQPFLMDLEGKQGNFKNLREFVFKNIDGYFKIYSKHTPINLVRDLPQGFSALEPLVDLPIGINITRFQTLLALHRSYLTPGDSSSGWTAGAAAYYVGYLQPRTFLLKYNENGTITDAVDCALDPLSETKCTLKSFTVEKGIYQTSNFRVQPTESIVRFPNITNLCPFGEVFNATRFASVYAWNRKRISNCVADYSVLYNSASFSTFKCYGVSPTKLNDLCFTNVYADSFVIRGDEVRQIAPGQTGKIADYNYKLPDDFTGCVIAWNSNNLDSKVGGNYNYLYRLFRKSNLKPFERDISTEIYQAGSTPCNGVEGFNCYFPLQPYGFQPTNGVGYQPYRVVVLSFELLHAPATVCGPKKSTNLVKNKCVNFNFNGLTGTGVLTESNKKFLPFQQFGRDIADTTDAVRDPQTLEILDITPCSFGGVSVITPGTNTSNQVAVLYQGVNCTEVPVAIHADQLTPTWRVYSTGSNVFQTRAGCLIGAEHVNNSYECDIPIGAGICASYQTQTNSHGSASSVASQSIIAYTMSLGAENSVAYSNNSIAIPINFTISVTTEILPVSMTKTSVDCTMYICGDSTECSNLLLQYGSFCTQLNRALTGIAVEQDKNTQEVFAQVKQIYKTPPIKDFGGFNFSQILPDPSKPSKRSPIEDLLFNKVTLADAGFIKQYGDCLGDIAARDLICAQKFNGLTVLPPLLTDEMIAQYTSALLAGTITSGWTFGAGPALQIPFPMQMAYRFNGIGVTQNVLYENQKLIANQFNSAIGKIQDSLSSTPSALGKLQDVVNQNAQALNTLVKQLSSNFGAISSVLNDILSRLDPPEAEVQIDRLITGRLQSLQTYVTQQLIRAAEIRASANLAATKMSECVLGQSKRVDFCGKGYHLMSFPQSAPHGVVFLHVTYVPAQEKNFTTAPAICHDGKAHFPREGVFVSNGTHWFVTQRNFYEPQIITTDNTFVSGNCDVVIGIVNNTVYDPLQPELDSFKEELDKYFKNHTSPDVDLGDISGINASVVNIQKEIDRLNEVAKNLNESLIDLQELGKYGSGSGSGSGSGSGSGSMENTTSGFLGPLLVLQAGFFLLTRILTIPQSLDSWWTSLNFLGGAPTCPGQNSRSPTSNHSPTSCPPICPGYRWMCLRRFIIFLFILLLCLIFLLVLLDYQGMLPVCPLLPGTSTTSTGPCKTCTNPANGTSMFPSCCCTKPSDGNCTCIPIPSSWAFARFLWEWASVRFSWLSFLVPFVQWFVGLSPTVWLSVMWMMWYWGPSLYNILSPFLPLLPIFFCLWVYI

SEQ ID NO: 83 - protein, 1454 aa, synthetic construct
  REGION 1..1454: note = Recombinant Sequence
MFVFLVLLPLVSSQCVNLRTRTQLPPAYTNSFTRGVYYPDKVFRSSVLHSTQDLFLPFFSNVTWFHAIHVSGTNGTKRFDNPVLPFNDGVYFASTEKSNIIRGWIFGTTLDSKTQSLLIVNNATNVVIKVCEFQFCNDPFLDVYYHKNNKSWMESGVYSSANNCTFEYVSQPFLMDLEGKQGNFKNLREFVFKNIDGYFKIYSKHTPINLVRDLPQGFSALEPLVDLPIGINITRFQTLLALHRSYLTPGDSSSGWTAGAAAYYVGYLQPRTFLLKYNENGTITDAVDCALDPLSETKCTLKSFTVEKGIYQTSNFRVQPTESIVRFPNITNLCPFGEVFNATRFASVYAWNRKRISNCVADYSVLYNSASFSTFKCYGVSPTKLNDLCFTNVYADSFVIRGDEVRQIAPGQTGKIADYNYKLPDDFTGCVIAWNSNNLDSKVGGNYNYRYRLFRKSNLKPFERDISTEIYQAGSKPCNGVEGFNCYFPLQSYGFQPTNGVGYQPYRVVVLSFELLHAPATVCGPKKSTNLVKNKCVNFNFNGLTGTGVLTESNKKFLPFQQFGRDIADTTDAVRDPQTLEILDITPCSFGGVSVITPGTNTSNQVAVLYQGVNCTEVPVAIHADQLTPTWRVYSTGSNVFQTRAGCLIGAEHVNNSYECDIPIGAGICASYQTQTNSRGSASSVASQSIIAYTMSLGAENSVAYSNNSIAIPTNFTISVTTEILPVSMTKTSVDCTMYICGDSTECSNLLLQYGSFCTQLNRALTGIAVEQDKNTQEVFAQVKQIYKTPPIKDFGGFNFSQILPDPSKPSKRSPIEDLLFNKVTLADAGFIKQYGDCLGDIAARDLICAQKFNGLTVLPPLLTDEMIAQYTSALLAGTITSGWTFGAGPALQIPFPMQMAYRFNGIGVTQNVLYENQKLIANQFNSAIGKIQDSLSSTPSALGKLQNVVNQNAQALNTLVKQLSSNFGAISSVLNDILSRLDPPEAEVQIDRLITGRLQSLQTYVTQQLIRAAEIRASANLAATKMSECVLGQSKRVDFCGKGYHLMSFPQSAPHGVVFLHVTYVPAQEKNFTTAPAICHDGKAHFPREGVFVSNGTHWFVTQRNFYEPQIITTDNTFVSGNCDVVIGIVNNTVYDPLQPELDSFKEELDKYFKNHTSPDVDLGDISGINASVVNIQKEIDRLNEVAKNLNESLIDLQELGKYGSGSGSGSGSGSGSGSGSGSGSGSMENTTSGFLGPLLVLQAGFFLLTRILTIPQSLDSWWTSLNFLGGAPTCPGQNSRSPTSNHSPTSCPPICPGYRWMCLRRFIIFLFILLLCLIFLLVLLDYQGMLPVCPLLPGTSTTSTGPCKTCTNPANGTSMFPSCCCTKPSDGNCTCIPIPSSWAFARFLWEWASVRFSWLSFLVPFVQWFVGLSPTVWLSVMWMMWYWGPSLYNILSPFLPLLPIFFCLWVYI

SEQ ID NO: 84 - protein, 1454 aa, synthetic construct
  REGION 1..1454: note = Recombinant Sequence
MFVFLVLLPLVSSQCVNLRTRTQLPPAYTNSFTRGVYYPDKVFRSSVLHSTQDLFLPFFSNVTWFHAIHFSGTNGTKRFDNPVLPFNDGVYFASIEKSNIIRGWIFGTTLDSKTQSLLIVNNATNVVIKVCEFQFCNDPFLDVYYHKNNKSWMESGVYSSANNCTFEYVSQPFLMDLEGKQGNFKNLREFVFKNIDGYFKIYSKHTPINLVRDLPQGFSVLEPLVDLPIGINITRFQTLLALHRSYLTPGDSSSGLTAGAAAYYVGYLQPRTFLLKYNENGTITDAVDCALDPLSETKCTLKSFTVEKGIYQTSNFRVQPTESIVRFPNITNLCPFGEVFNATRFASVYAWNRKRISNCVADYSVLYNSASFSTFKCYGVSPTKLNDLCFTNVYADSFVIRGDEVRQIAPGQTGNIADYNYKLPDDFTGCVIAWNSNNLDSKVGGNYNYRYRLFRKSNLKPFERDISTEIYQAGSKPCNGVEGFNCYFPLQSYGFQPTNGVGYQPYRVVVLSFELLHAPATVCGPKKSTNLVKNKCVNFNFNGLTGTGVLTESNKKFLPFQQFGRDIADTTDAVRDPQTLEILDITPCSFGGVSVITPGTNTSNQVAVLYQGVNCTEVPVAIHADQLTPTWRVYSTGSNVFQTRAGCLIGAEHVNNSYECDIPIGAGICASYQTQTNSRGSASSVASQSIIAYTMSLGAENSVAYSNNSIAIPTNFTISVTTEILPVSMTKTSVDCTMYICGDSTECSNLLLQYGSFCTQLNRALTGIAVEQDKNTQEVFAQVKQIYKTPPIKDFGGFNFSQILPDPSKPSKRSPIEDLLFNKVTLADAGFIKQYGDCLGDIAARDLICAQKFNGLTVLPPLLTDEMIAQYTSALLAGTITSGWTFGAGPALQIPFPMQMAYRFNGIGVTQNVLYENQKLIANQFNSAIGKIQDSLSSTPSALGKLQNVVNQNAQALNTLVKQLSSNFGAISSVLNDILSRLDPPEAEVQIDRLITGRLQSLQTYVTQQLIRAAEIRASANLAATKMSECVLGQSKRVDFCGKGYHLMSFPQSAPHGVVFLHVTYVPAQEKNFTTAPAICHDGKAHFPREGVFVSNGTHWFVTQRNFYEPQIITTDNTFVSGNCDVVIGIVNNTVYDPLQPELDSFKEELDKYFKNHTSPDVDLGDISGINASVVNIQKEIDRLNEVAKNLNESLIDLQELGKYGSGSGSGSGSGSGSGSGSGSGSGSMENTTSGFLGPLLVLQAGFFLLTRILTIPQSLDSWWTSLNFLGGAPTCPGQNSRSPTSNHSPTSCPPICPGYRWMCLRRFIIFLFILLLCLIFLLVLLDYQGMLPVCPLLPGTSTTSTGPCKTCTNPANGTSMFPSCCCTKPSDGNCTCIPIPSSWAFARFLWEWASVRFSWLSFLVPFVQWFVGLSPTVWLSVMWMMWYWGPSLYNILSPFLPLLPIFFCLWVYI

SEQ ID NO: 85 - protein, 1453 aa, synthetic construct
  REGION 1..1453: note = Recombinant Sequence
MFVFLVLLPLVSSQCVNLTTRTQLPPAYTNSFTRGVYYPDKVFRSSVLHSTQDLFLPFFSNVTWFHAISGTNGTKRFDNPVLPFNDGVYFASTEKSNIIRGWIFGTTLDSKTQSLLIVNNATNVVIKVCEFQFCNDPFLGVYHKNNKSWMESEFRVYSSANNCTFEYVSQPFLMDLEGKQGNFKNLREFVFKNIDGYFKIYSKHTPINLVRDLPQGFSALEPLVDLPIGINITRFQTLLALHRSYLTPGDSSSGWTAGAAAYYVGYLQPRTFLLKYNENGTITDAVDCALDPLSETKCTLKSFTVEKGIYQTSNFRVQPTESIVRFPNITNLCPFGEVFNATRFASVYAWNRKRISNCVADYSVLYNSASFSTFKCYGVSPTKLNDLCFTNVYADSFVIRGDEVRQIAPGQTGKIADYNYKLPDDFTGCVIAWNSNNLDSKVGGNYNYLYRLFRKSNLKPFERDISTEIYQAGSTPCNGVEGFNCYFPLQSYGFQPTYGVGYQPYRVVVLSFELLHAPATVCGPKKSTNLVKNKCVNFNFNGLTGTGVLTESNKKFLPFQQFGRDIDDTTDAVRDPQTLEILDITPCSFGGVSVITPGTNTSNQVAVLYQGVNCTEVPVAIHADQLTPTWRVYSTGSNVFQTRAGCLIGAEHVNNSYECDIPIGAGICASYQTQTNSHGSASSVASQSIIAYTMSLGAENSVAYSNNSIAIPINFTISVTTEILPVSMTKTSVDCTMYICGDSTECSNLLLQYGSFCTQLNRALTGIAVEQDKNTQEVFAQVKQIYKTPPIKDFGGFNFSQILPDPSKPSKRSPIEDLLFNKVTLADAGFIKQYGDCLGDIAARDLICAQKFNGLTVLPPLLTDEMIAQYTSALLAGTITSGWTFGAGPALQIPFPMQMAYRFNGIGVTQNVLYENQKLIANQFNSAIGKIQDSLSSTPSALGKLQDVVNQNAQALNTLVKQLSSNFGAISSVLNDILARLDPPEAEVQIDRLITGRLQSLQTYVTQQLIRAAEIRASANLAATKMSECVLGQSKRVDFCGKGYHLMSFPQSAPHGVVFLHVTYVPAQEKNFTTAPAICHDGKAHFPREGVFVSNGTHWFVTQRNFYEPQIITTHNTFVSGNCDVVIGIVNNTVYDPLQPELDSFKEELDKYFKNHTSPDVDLGDISGINASVVNIQKEIDRLNEVAKNLNESLIDLQELGKYGSGSGSGSGSGSGSGSGSGSGSGSMENTTSGFLGPLLVLQAGFFLLTRILTIPQSLDSWWTSLNFLGGAPTCPGQNSRSPTSNHSPTSCPPICPGYRWMCLRRFIIFLFILLLCLIFLLVLLDYQGMLPVCPLLPGTSTTSTGPCKTCTNPANGTSMFPSCCCTKPSDGNCTCIPIPSSWAFARFLWEWASVRFSWLSFLVPFVQWFVGLSPTVWLSVMWMMWYWGPSLYNILSPFLPLLPIFFCLWVYI

SEQ ID NO: 86 - protein, 1453 aa, synthetic construct
  REGION 1..1453: note = Recombinant Sequence
MFVFLVLLPLVSSQCVNLTTRTQLPPAYTNSFTRGVYYPDKVFRSSVLHSTQDLFLPFFSNVTWFHAISGTNGTKRFDNPVLPFNDGVYFASTEKSNIIRGWIFGTTLDSKTQSLLIVNNATNVVIKVCEFQFCNDPFLGVYHKNNKSWMESEFRVYSSANNCTFEYVSQPFLMDLEGKQGNFKNLREFVFKNIDGYFKIYSKHTPINLVRDLPQGFSALEPLVDLPIGINITRFQTLLALHRSYLTPGDSSSGWTAGAAAYYVGYLQPRTFLLKYNENGTITDAVDCALDPLSETKCTLKSFTVEKGIYQTSNFRVQPTESIVRFPNITNLCPFGEVFNATRFASVYAWNRKRISNCVADYSVLYNSASFSTFKCYGVSPTKLNDLCFTNVYADSFVIRGDEVRQIAPGQTGKIADYNYKLPDDFTGCVIAWNSNNLDSKVGGNYNYLYRLFRKSNLKPFERDISTEIYQAGSTPCNGVKGFNCYFPLQPYGFQPTYGVGYQPYRVVVLSFELLHAPATVCGPKKSTNLVKNKCVNFNFNGLTGTGVLTESNKKFLPFQQFGRDIDDTTDAVRDPQTLEILDITPCSFGGVSVITPGTNTSNQVAVLYQGVNCTEVPVAIHADQLTPTWRVYSTGSNVFQTRAGCLIGAEHVNNSYECDIPIGAGICASYQTQTNSHGSASSVASQSIIAYTMSLGAENSVAYSNNSIAIPINFTISVTTEILPVSMTKTSVDCTMYICGDSTECSNLLLQYGSFCTQLNRALTGIAVEQDKNTQEVFAQVKQIYKTPPIKDFGGFNFSQILPDPSKPSKRSPIEDLLFNKVTLADAGFIKQYGDCLGDIAARDLICAQKFNGLTVLPPLLTDEMIAQYTSALLAGTITSGWTFGAGPALQIPFPMQMAYRFNGIGVTQNVLYENQKLIANQFNSAIGKIQDSLSSTPSALGKLQDVVNQNAQALNTLVKQLSSNFGAISSVLNDILARLDPPEAEVQIDRLITGRLQSLQTYVTQQLIRAAEIRASANLAATKMSECVLGQSKRVDFCGKGYHLMSFPQSAPHGVVFLHVTYVPAQEKNFTTAPAICHDGKAHFPREGVFVSNGTHWFVTQRNFYEPQIITTHNTFVSGNCDVVIGIVNNTVYDPLQPELDSFKEELDKYFKNHTSPDVDLGDISGINASVVNIQKEIDRLNEVANNLNESLIDLQELGKYGSGSGSGSGSGSGSGSGSGSGSGSMENTTSGFLGPLLVLQAGFFLLTRILTIPQSLDSWWTSLNFLGGAPTCPGQNSRSPTSNHSPTSCPPICPGYRWMCLRRFIIFLFILLLCLIFLLVLLDYQGMLPVCPLLPGTSTTSTGPCKTCTNPANGTSMFPSCCCTKPSDGNCTCIPIPSSWAFARFLWEWASVRFSWLSFLVPFVQWFVGLSPTVWLSVMWMMWYWGPSLYNILSPFLPLLPIFFCLWVYI

SEQ ID NO: 87 - protein, 1453 aa, synthetic construct
  REGION 1..1453: note = Recombinant Sequence
MFVFLVLLPLVSSQCVNFTTRTQLPPAYTNSFTRGVYYPDKVFRSSVLHSTQDLFLPFFSNVTWFHAIHVSGTNGTKRFANPVLPFNDGVYFASTEKSNIIRGWIFGTTLDSKTQSLLIVNNATNVVIKVCEFQFCNDPFLGVYYHKNNKSWMESEFRVYSSANNCTFEYVSQPFLMDLEGKQGNFKNLREFVFKNIDGYFKIYSKHTPINLVRGLPQGFSALEPLVDLPIGINITRFQTLHRSYLTPGDSSSGWTAGAAAYYVGYLQPRTFLLKYNENGTITDAVDCALDPLSETKCTLKSFTVEKGIYQTSNFRVQPTESIVRFPNITNLCPFGEVFNATRFASVYAWNRKRISNCVADYSVLYNSASFSTFKCYGVSPTKLNDLCFTNVYADSFVIRGDEVRQIAPGQTGNIADYNYKLPDDFTGCVIAWNSNNLDSKVGGNYNYLYRLFRKSNLKPFERDISTEIYQAGSTPCNGVKGFNCYFPLQSYGFQPTYGVGYQPYRVVVLSFELLHAPATVCGPKKSTNLVKNKCVNFNFNGLTGTGVLTESNKKFLPFQQFGRDIADTTDAVRDPQTLEILDITPCSFGGVSVITPGTNTSNQVAVLYQGVNCTEVPVAIHADQLTPTWRVYSTGSNVFQTRAGCLIGAEHVNNSYECDIPIGAGICASYQTQTNSPGSASSVASQSIIAYTMSLGVENSVAYSNNSIAIPTNFTISVTTEILPVSMTKTSVDCTMYICGDSTECSNLLLQYGSFCTQLNRALTGIAVEQDKNTQEVFAQVKQIYKTPPIKDFGGFNFSQILPDPSKPSKRSPIEDLLFNKVTLADAGFIKQYGDCLGDIAARDLICAQKFNGLTVLPPLLTDEMIAQYTSALLAGTITSGWTFGAGPALQIPFPMQMAYRFNGIGVTQNVLYENQKLIANQFNSAIGKIQDSLSSTPSALGKLQDVVNQNAQALNTLVKQLSSNFGAISSVLNDILSRLDPPEAEVQIDRLITGRLQSLQTYVTQQLIRAAEIRASANLAATKMSECVLGQSKRVDFCGKGYHLMSFPQSAPHGVVFLHVTYVPAQEKNFTTAPAICHDGKAHFPREGVFVSNGTHWFVTQRNFYEPQIITTDNTFVSGNCDVVIGIVNNTVYDPLQPELDSFKEELDKYFKNHTSPDVDLGDISGINASVVNIQKEIDRLNEVAKNLNESLIDLQELGKYGSGSGSGSGSGSGSGSGSGSGSGSMENTTSGFLGPLLVLQAGFFLLTRILTIPQSLDSWWTSLNFLGGAPTCPGQNSRSPTSNHSPTSCPPICPGYRWMCLRRFIIFLFILLLCLIFLLVLLDYQGMLPVCPLLPGTSTTSTGPCKTCTNPANGTSMFPSCCCTKPSDGNCTCIPIPSSWAFARFLWEWASVRFSWLSFLVPFVQWFVGLSPTVWLSVMWMMWYWGPSLYNILSPFLPLLPIFFCLWVYI

SEQ ID NO: 88 - protein, 1456 aa, synthetic construct
  REGION 1..1456: note = Recombinant Sequence
MFVFLVLLPLVSSQCVNFTNRTQLPSAYTNSFTRGVYYPDKVFRSSVLHSTQDLFLPFFSNVTWFHAIHVSGTNGTKRFDNPVLPFNDGVYFASTEKSNIIRGWIFGTTLDSKTQSLLIVNNATNVVIKVCEFQFCNYPFLGVYYHKNNKSWMESEFRVYSSANNCTFEYVSQPFLMDLEGKQGNFKNLSEFVFKNIDGYFKIYSKHTPINLVRDLPQGFSALEPLVDLPIGINITRFQTLLALHRSYLTPGDSSSGWTAGAAAYYVGYLQPRTFLLKYNENGTITDAVDCALDPLSETKCTLKSFTVEKGIYQTSNFRVQPTESIVRFPNITNLCPFGEVFNATRFASVYAWNRKRISNCVADYSVLYNSASFSTFKCYGVSPTKLNDLCFTNVYADSFVIRGDEVRQIAPGQTGTIADYNYKLPDDFTGCVIAWNSNNLDSKVGGNYNYLYRLFRKSNLKPFERDISTEIYQAGSTPCNGVKGFNCYFPLQSYGFQPTYGVGYQPYRVVVLSFELLHAPATVCGPKKSTNLVKNKCVNFNFNGLTGTGVLTESNKKFLPFQQFGRDIADTTDAVRDPQTLEILDITPCSFGGVSVITPGTNTSNQVAVLYQGVNCTEVPVAIHADQLTPTWRVYSTGSNVFQTRAGCLIGAEYVNNSYECDIPIGAGICASYQTQTNSPGSASSVASQSIIAYTMSLGAENSVAYSNNSIAIPTNFTISVTTEILPVSMTKTSVDCTMYICGDSTECSNLLLQYGSFCTQLNRALTGIAVEQDKNTQEVFAQVKQIYKTPPIKDFGGFNFSQILPDPSKPSKRSPIEDLLFNKVTLADAGFIKQYGDCLGDIAARDLICAQKFNGLTVLPPLLTDEMIAQYTSALLAGTITSGWTFGAGPALQIPFPMQMAYRFNGIGVTQNVLYENQKLIANQFNSAIGKIQDSLSSTPSALGKLQDVVNQNAQALNTLVKQLSSNFGAISSVLNDILSRLDPPEAEVQIDRLITGRLQSLQTYVTQQLIRAAEIRASANLAAIKMSECVLGQSKRVDFCGKGYHLMSFPQSAPHGVVFLHVTYVPAQEKNFTTAPAICHDGKAHFPREGVFVSNGTHWFVTQRNFYEPQIITTDNTFVSGNCDVVIGIVNNTVYDPLQPELDSFKEELDKYFKNHTSPDVDLGDISGINASFVNIQKEIDRLNEVAKNLNESLIDLQELGKYGSGSGSGSGSGSGSGSGSGSGSGSMENTTSGFLGPLLVLQAGFFLLTRILTIPQSLDSWWTSLNFLGGAPTCPGQNSRSPTSNHSPTSCPPICPGYRWMCLRRFIIFLFILLLCLIFLLVLLDYQGMLPVCPLLPGTSTTSTGPCKTCTNPANGTSMFPSCCCTKPSDGNCTCIPIPSSWAFARFLWEWASVRFSWLSFLVPFVQWFVGLSPTVWLSVMWMMWYWGPSLYNILSPFLPLLPIFFCLWVYI

SEQ ID NO: 89 - protein, 1456 aa, synthetic construct
  REGION 1..1456: note = Recombinant Sequence
MFVFLVLLPLVSSQCVNLTTRTQLPPAYTNSFTRGVYYPDKVFRSSVLHSTQDLFLPFFSNVTWFHAIHVSGTNGTKRFDNPVLPFNDGVYFASIEKSNIIRGWIFGTTLDSKTQSLLIVNNATNVVIKVCEFQFCNDPFLDVYYHKNNKSWMKSEFRVYSSANNCTFEYVSQPFLMDLEGKQGNFKNLREFVFKNIDGYFKIYSKHTPINLVRDLPQGFSALEPLVDLPIGINITRFQTLLALHRSYLTPGDSSSGWTAGAAAYYVGYLQPRTFLLKYNENGTITDAVDCALDPLSETKCTLKSFTVEKGIYQTSNFRVQPTESIVRFPNITNLCPFGEVFNATRFASVYAWNRKRISNCVADYSVLYNSASFSTFKCYGVSPTKLNDLCFTNVYADSFVIRGDEVRQIAPGQTGKIADYNYKLPDDFTGCVIAWNSNNLDSKVGGNYNYRYRLFRKSNLKPFERDISTEIYQAGSTPCNGVQGFNCYFPLQSYGFQPTNGVGYQPYRVVVLSFELLHAPATVCGPKKSTNLVKNKCVNFNFNGLTGTGVLTESNKKFLPFQQFGRDIADTTDAVRDPQTLEILDITPCSFGGVSVITPGTNTSNQVAVLYQGVNCTEVPVAIHADQLTPTWRVYSTGSNVFQTRAGCLIGAEHVNNSYECDIPIGAGICASYQTQTNSRGSASSVASQSIIAYTMSLGAENSVAYSNNSIAIPTNFTISVTTEILPVSMTKTSVDCTMYICGDSTECSNLLLQYGSFCTQLNRALTGIAVEQDKNTQEVFAQVKQIYKTPPIKDFGGFNFSQILPDPSKPSKRSPIEDLLFNKVTLADAGFIKQYGDCLGDIAARDLICAQKFNGLTVLPPLLTDEMIAQYTSALLAGTITSGWTFGAGPALQIPFPMQMAYRFNGIGVTQNVLYENQKLIANQFNSAIGKIQDSLSSTPSALGKLQDVVNQNAQALNTLVKQLSSNFGAISSVLNDILSRLDPPEAEVQIDRLITGRLQSLQTYVTQQLIRAAEIRASANLAATKMSECVLGQSKRVDFCGKGYHLMSFPQSAPHGVVFLHVTYVPAHEKNFTTAPAICHDGKAHFPREGVFVSNGTHWFVTQRNFYEPQIITTDNTFVSGNCDVVIGIVNNTVYDPLQPELDSFKEELDKYFKNHTSPDVDLGDISGINASVVNIQKEIDRLNEVAKNLNESLIDLQELGKYGSGSGSGSGSGSGSGSGSGSGSGSMENTTSGFLGPLLVLQAGFFLLTRILTIPQSLDSWWTSLNFLGGAPTCPGQNSRSPTSNHSPTSCPPICPGYRWMCLRRFIIFLFILLLCLIFLLVLLDYQGMLPVCPLLPGTSTTSTGPCKTCTNPANGTSMFPSCCCTKPSDGNCTCIPIPSSWAFARFLWEWASVRFSWLSFLVPFVQWFVGLSPTVWLSVMWMMWYWGPSLYNILSPFLPLLPIFFCLWVYI

SEQ ID NO: 90 - protein, 1449 aa, synthetic construct
  REGION 1..1449: note = Recombinant Sequence
MFVFLVLLPLVSSQCVNLTTRTQLPPAYTNSFTRGVYYPDKVFRSSVLHSTQDLFLPFFSNVTWFHAIHVSGTNVIKRFDNPVLPFNDGVYFASTEKSNIIRGWIFGTTLDSKTQSLLIVNNATNVVIKVCEFQFCNDPFLGVYYHKNNKSWMESEFRVYSSANNCTFEYVSQPFLMDLEGKQGNFKNLREFVFKNIDGYFKIYSKHTPINLVRDLPQGFSALEPLVDLPIGINITRFQTLLALHNSSSGWTAGAAAYYVGYLQPRTFLLKYNENGTITDAVDCALDPLSETKCTLKSFTVEKGIYQTSNFRVQPTESIVRFPNITNLCPFGEVFNATRFASVYAWNRKRISNCVADYSVLYNSASFSTFKCYGVSPTKLNDLCFTNVYADSFVIRGDEVRQIAPGQTGKIADYNYKLPDDFTGCVIAWNSNNLDSKVGGNYNYQYRLFRKSNLKPFERDISTEIYQAGSTPCNGVEGFNCYSPLQSYGFQPTNGVGYQPYRVVVLSFELLHAPATVCGPKKSTNLVKNKCVNFNFNGLTGTGVLTESNKKFLPFQQFGRDIADTTDAVRDPQTLEILDITPCSFGGVSVITPGTNTSNQVAVLYQGVNCTEVPVAIHADQLTPTWRVYSTGSNVFQTRAGCLIGAEHVNNSYECDIPIGAGICASYQTQTNSPGSASSVASQSIIAYTMSLGAENSVAYSNNSIAIPTNFTISVTTEILPVSMTKTSVDCTMYICGDSTECSNLLLQYGSFCTQLNRALTGIAVEQDKNTQEVFAQVKQIYKTPPIKDFGGFNFSQILPDPSKPSKRSPIEDLLFNKVTLADAGFIKQYGDCLGDIAARDLICAQKFNGLNVLPPLLTDEMIAQYTSALLAGTITSGWTFGAGPALQIPFPMQMAYRFNGIGVTQNVLYENQKLIANQFNSAIGKIQDSLSSTPSALGKLQDVVNQNAQALNTLVKQLSSNFGAISSVLNDILSRLDPPEAEVQIDRLITGRLQSLQTYVTQQLIRAAEIRASANLAATKMSECVLGQSKRVDFCGKGYHLMSFPQSAPHGVVFLHVTYVPAQEKNFTTAPAICHDGKAHFPREGVFVSNGTHWFVTQRNFYEPQIITTDNTFVSGNCDVVIGIVNNTVYDPLQPELDSFKEELDKYFKNHTSPDVDLGDISGINASVVNIQKEIDRLNEVAKNLNESLIDLQELGKYGSGSGSGSGSGSGSGSGSGSGSGSMENTTSGFLGPLLVLQAGFFLLTRILTIPQSLDSWWTSLNFLGGAPTCPGQNSRSPTSNHSPTSCPPICPGYRWMCLRRFIIFLFILLLCLIFLLVLLDYQGMLPVCPLLPGTSTTSTGPCKTCTNPANGTSMFPSCCCTKPSDGNCTCIPIPSSWAFARFLWEWASVRFSWLSFLVPFVQWFVGLSPTVWLSVMWMMWYWGPSLYNILSPFLPLLPIFFCLWVYI

SEQ ID NO: 91 - protein, 1448 aa, synthetic construct
  REGION 1..1448: note = Recombinant Sequence
MFVFLVLLPLVSSQCVNLTTRTQLPPAYTNSFTRGVYYPDKVFRSSVLHSTQDLFLPFFSNVTWFHAIHVSGTNVIKRFDNPVLPFNDGVYFASTEKSNIIRGWIFGTTLDSKTQSLLIVNNATNVVIKVCEFQFCNDPFLGVYYHKNNKSWMESEFRVYSSANNCTFEYVSQPFLMDLEGKQGNFKNLREFVFKNIDGYFKIYSKHTPINLVRDLPQGFSALEPLVDLPIGINITRFQTLLALHSSSGWTAGAAAYYVGYLQPRTFLLKYNENGTITDAVDCALDPLSETKCTLKSFTVEKGIYQTSNFRVQPTESIVRFPNITNLCPFGEVFNATRFASVYAWNRKRISNCVADYSVLYNSASFSTFKCYGVSPTKLNDLCFTNVYADSFVIRGDEVRQIAPGQTGKIADYNYKLPDDFTGCVIAWNSNNLDSKVGGNYNYQYRLFRKSNLKPFERDISTEIYQAGSTPCNGVEGFNCYSPLQSYGFQPTNGVGYQPYRVVVLSFELLHAPATVCGPKKSTNLVKNKCVNFNFNGLTGTGVLTESNKKFLPFQQFGRDIADTTDAVRDPQTLEILDITPCSFGGVSVITPGTNTSNQVAVLYQGVNCTEVPVAIHADQLTPTWRVYSTGSNVFQTRAGCLIGAEHVNNSYECDIPIGAGICASYQTQTNSPGSASSVASQSIIAYTMSLGAENSVAYSNNSIAIPTNFTISVTTEILPVSMTKTSVDCTMYICGDSTECSNLLLQYGSFCTQLNRALTGIAVEQDKNTQEVFAQVKQIYKTPPIKDFGGFNFSQILPDPSKPSKRSPIEDLLFNKVTLADAGFIKQYGDCLGDIAARDLICAQKFNGLNVLPPLLTDEMIAQYTSALLAGTITSGWTFGAGPALQIPFPMQMAYRFNGIGVTQNVLYENQKLIANQFNSAIGKIQDSLSSTPSALGKLQDVVNQNAQALNTLVKQLSSNFGAISSVLNDILSRLDPPEAEVQIDRLITGRLQSLQTYVTQQLIRAAEIRASANLAATKMSECVLGQSKRVDFCGKGYHLMSFPQSAPHGVVFLHVTYVPAQEKNFTTAPAICHDGKAHFPREGVFVSNGTHWFVTQRNFYEPQIITTDNTFVSGNCDVVIGIVNNTVYDPLQPELDSFKEELDKYFKNHTSPDVDLGDISGINASVVNIQKEIDRLNEVAKNLNESLIDLQELGKYGSGSGSGSGSGSGSGSGSGSGSGSMENTTSGFLGPLLVLQAGFFLLTRILTIPQSLDSWWTSLNFLGGAPTCPGQNSRSPTSNHSPTSCPPICPGYRWMCLRRFIIFLFILLLCLIFLLVLLDYQGMLPVCPLLPGTSTTSTGPCKTCTNPANGTSMFPSCCCTKPSDGNCTCIPIPSSWAFARFLWEWASVRFSWLSFLVPFVQWFVGLSPTVWLSVMWMMWYWGPSLYNILSPFLPLLPIFFCLWVYI

SEQ ID NO: 92 - protein, 1456 aa, synthetic construct
  REGION 1..1456: note = Recombinant Sequence
MFVFLVLLPLVSSQCVNLTTRTQLPPAYTNSFTRGVYYPDKVFRSSVLHSTQDLFLPFFSNVTWFHAIHVSGTNGTKRFDNPVLPFNDGVYFASTEKSNIIRGWIFGTTLDSKTQSLLIVNNATNVVIKVCEFQFCNDPFLGVYYHKNNKSLMESEFRVYSSANNCTFEYVSQPFLMDLEGKQGNFKNLREFVFKNIDGYFKIYSKHTPINLVRDLPQGFSALEPLVDLPIGINITRFQTLLALHRSYLTPGDSSSGWTAGAAAYYVGYLQPRTFLLKYNENGTITDAVDCALDPLSETKCTLKSFTVEKGIYQTSNFRVQPTESIVRFPNITNLCPFGEVFNATRFASVYAWNRKRISNCVADYSVLYNSASFSTFKCYGVSPTKLNDLCFTNVYADSFVIRGDEVRQIAPGQTGKIADYNYKLPDDFTGCVIAWNSNNLDSKVGGNYNYLYRLFRKSNLKPFERDISTEIYQAGSTPCNGVKGFNCYFPLQSYGFQPTNGVGYQPYRVVVLSFELLHAPATVCGPKKSTNLVKNKCVNFNFNGLTGTGVLTESNKKFLPFQQFGRDIADTTDAVRDPQTLEILDITPCSFGGVSVITPGTNTSNQVAVLYQGVNCTEVPVAIHADQLTPTWRVYSTGSNVFQTRAGCLIGAEHVNNSYECDIPIGAGICASYQTQTNSPGSASSVASQSIIAYTMSLGAENSVAYSNNSIAIPTNFTISVTTEILPVSMTKTSVDCTMYICGDSTECSNLLLQYGSFCTQLNRALTVIAVEQDKNTQEVFAQVKQIYKTPPIKDFGGFNFSQILPDPSKPSKRSPIEDLLFNKVTLADAGFIKQYGDCLGDIAARDLICAQKFNGLTVLPPLLTDEMIAQYTSALLAGTITSGWTFGAGPALQIPFPMQMAYRFNGIGVTQNVLYENQKLIANQFNSAIGKIQDSLSSTPSALGKLQDVVNQNAQALNTLVKQLSSNFGAISSVLNDILSRLDPPEAEVQIDRLITGRLQSLQTYVTQQLIRAAEIRASANLAATKMSECVLGQSKRVDFCGKGYHLMSFPQSAPHGVVFLHVTYVPAQEKNFTTAPAICHDGKAHFPREGVFVSNGTHWFVTQRNFYEPQIITTDNTFVSGNCDVVIGIVNNTVYDPLQPELDSFKEELDKYFKNHTSPDVDLGDISGINASVVNIQKEIDRLNEVAKNLNESLIDLQELGKYGSGSGSGSGSGSGSGSGSGSGSGSMENTTSGFLGPLLVLQAGFFLLTRILTIPQSLDSWWTSLNFLGGAPTCPGQNSRSPTSNHSPTSCPPICPGYRWMCLRRFIIFLFILLLCLIFLLVLLDYQGMLPVCPLLPGTSTTSTGPCKTCTNPANGTSMFPSCCCTKPSDGNCTCIPIPSSWAFARFLWEWASVRFSWLSFLVPFVQWFVGLSPTVWLSVMWMMWYWGPSLYNILSPFLPLLPIFFCLWVYI

SEQ ID NO: 93 - protein, 1456 aa, synthetic construct
  REGION 1..1456: note = Recombinant Sequence
MFVFLVLLPLVSSQCVNLTTRTQLPPAYTNSFTRGVYYPDKVFRSSVLHSTQDLFLPFFSNVTWFHAIHVSGTNGTKRFDNPVLPFNDGVYFASTEKSNIIRGWIFGTTLDSKTQSLLIVNNATNVVIKVCEFQFCNDPFLGVYYHKNNKSWMESEFRVYSSANNCTFEYVSQPFLMDLEGKQGNFKNLREFVFKNIDGYFKIYSKHTPINLVRDLPQGFSALEPLVDLPIGINITRFQTLLALHRSYLTPGDSSSGWTAGAAAYYVGYLQPRTFLLKYNENGTITDAVDCALDPLSETKCTLKSFTVEKGIYQTSNFRVQPTESIVRFPNITNLCPFGEVFNATRFASVYAWNRKRISNCVADYSVLYNSASFSTFKCYGVSPTKLNDLCFTNVYADSFVIRGDEVRQIAPGQTGKIADYNYKLPDDFTGCVIAWNSNNLDSKVGGNYNYLYRLFRKSNLKPFERDISTEIYQAGSKPCNGVEGFNCYFPLQSYGFQPTNGVGYQPYRVVVLSFELLHAPATVCGPKKSTNLVKNKCVNFNFNGLTGTGVLTESNKKFLPFQQFGRDIADTTDAVRDPQTLEILDITPCSFGGVSVITPGTNTSNQVAVLYQGVNCTEVPVAIHADQLTPTWRVYSTGSNVFQTRAGCLIGAEHVNNSYECDIPIGAGICASYQTQTNSHGSASSVASQSIIAYTMSLGAENSVAYSNNSIAIPTNFTISVTTEILPVSMAKTSVDCTMYICGDSTECSNLLLQYGSFCTQLNRALTGIAVEQDKNTQEVFAQVKQIYKTPPIKDFGGFNFSQILPDPSKPSKRSPIEDLLFNKVTLADAGFIKQYGDCLGDIAARDLICAQKFNGLTVLPPLLTDEMIAQYTSALLAGTITSGWTFGAGPALQIPFPMQMAYRFNGIGVTQNVLYENQKLIANQFNSAIGKIQDSLSSTPSALGKLQDVVNQNAQALNTLVKQLSSNFGAISSVLNDILSRLDPPEAEVQIDRLITGRLQSLQTYVTQQLIRAAEIRASANLAATKMSECVLGQSKRVDFCGKGYHLMSFPQSAPHGVVFLHVTYVPAQEKNFTTAPAICHDGKAHFPREGVFVSNGTHWFVTQRNFYEPQIITTDNTFVSGNCDVVIGIVNNTVYDPLQPELDSFKEELDKYFKNHTSPDVDLGDISGINASVVNIQKEIDRLNEVAKNLNESLIDLQELGKYGSGSGSGSGSGSGSGSGSGSGSGSMENTTSGFLGPLLVLQAGFFLLTRILTIPQSLDSWWTSLNFLGGAPTCPGQNSRSPTSNHSPTSCPPICPGYRWMCLRRFIIFLFILLLCLIFLLVLLDYQGMLPVCPLLPGTSTTSTGPCKTCTNPANGTSMFPSCCCTKPSDGNCTCIPIPSSWAFARFLWEWASVRFSWLSFLVPFVQWFVGLSPTVWLSVMWMMWYWGPSLYNILSPFLPLLPIFFCLWVYI

SEQ ID NO: 94 - protein, 1453 aa, synthetic construct
  REGION 1..1453: note = Recombinant Sequence
MFVFLVLLPLVSSQCVNLTTRTQLPPAYTNSFTRGVYYPDKVFRSSVLHSTRDLFLPFFSNVTWFHVISGTNGTKRFDNPVLPFNDGVYFASTEKSNIIRGWIFGTTLDSKTQSLLIVNNATNVVIKVCEFQFCNDPFLGVYHKNNKSWMESEFRVYSSANNCTFEYVSQPFLMDLEGKQGNFKNLREFVFKNIDGYFKIYSKHTPINLVRDLPQGFSALEPLVDLPIGINITRFQTLLALHRSYLTPGDSSSGWTAGAAAYYVGYLQPRTFLLKYNENGTITDAVDCALDPLSETKCTLKSFTVEKGIYQTSNFRVQPTESIVRFPNITNLCPFGEVFNATRFASVYAWNRKRISNCVADYSVLYNSASFSTFKCYGVSPTKLNDLCFTNVYADSFVIRGDEVRQIAPGQTGKIADYNYKLPDDFTGCVIAWNSNNLDSKVGGNYNYLYRLFRKSNLKPFERDISTEIYQAGSTPCNGVKGFNCYFPLQSYGFQPTNGVGYQPYRVVVLSFELLHAPATVCGPKKSTNLVKNKCVNFNFNGLTGTGVLTESNKKFLPFQQFGRDIADTTDAVRDPQTLEILDITPCSFGGVSVITPGTNTSNQVAVLYQGVNCTEVPVAIHADQLTPTWRVYSTGSNVFQTRAGCLIGAEHVNNSYECDIPIGAGICASYQTHTNSPGSASSVASQSIIAYTMSLGAENSVAYSNNSIAIPTNFTISVTTEILPVSMTKTSVDCTMYICGDSTECSNLLLQYGSFCTQLNRALTGIAVEQDKNTQEVFAQVKQIYKTPPIKDFGGFNFSQILPDPSKPSKRSPIEDLLFNKVTLADAGFIKQYGDCLGDIAARDLICAQKFNGLTVLPPLLTDEMIAQYTSALLAGTITSGWTLGAGPALQIPFPMQMAYRFNGIGVTQNVLYENQKLIANQFNSAIGKIQDSLSSTPSALGKLQDVVNQNAQALNTLVKQLSSNFGAISSVLNDILSRLDPPEAEVQIDRLITGRLQSLQTYVTQQLIRAAEIRASANLAATKMSECVLGQSKRVDFCGKGYHLMSFPQSAPHGVVFLHVTYVPAQEKNFTTAPAICHDGKAHFPREGVFVSNGTHWFVTQRNFYEPQIITTDNTFVSGNCDVVIGIVNNTVYDPLQPELDSFKEELDKYFKNHTSPDVDLGDISGINASVVNIQKEIDRLNEVAKNLNESLIDLQELGKYGSGSGSGSGSGSGSGSGSGSGSGSMENTTSGFLGPLLVLQAGFFLLTRILTIPQSLDSWWTSLNFLGGAPTCPGQNSRSPTSNHSPTSCPPICPGYRWMCLRRFIIFLFILLLCLIFLLVLLDYQGMLPVCPLLPGTSTTSTGPCKTCTNPANGTSMFPSCCCTKPSDGNCTCIPIPSSWAFARFLWEWASVRFSWLSFLVPFVQWFVGLSPTVWLSVMWMMWYWGPSLYNILSPFLPLLPIFFCLWVYI

SEQ ID NO: 95 - protein, 1456 aa, synthetic construct
  REGION 1..1456: note = Recombinant Sequence
MFVFFVLLPLVSSQCVNLTTRTQLPPAYTNSFTRGVYYPDKVFRSSVLHSTQDLFLPFFSNVTWFHAIHVSGTNGTKRFDNPVLPFNDGVYFASIEKSNIIRGWIFGTTLDSKTQSLLIVNNATNVVIKVCEFQFCNDPFLGVYYHKNNKSWMESEFRVYSSANNCTFEYVSQPFLMDLEGKQGNFKNLREFVFKNIDGYFKIYSKHTPINLVRDLPQGFSALEPLVDLPIGINITRFQTLLALHRSYLTPGGSSSGWTAGAAAYYVGYLQPRTFLLKYNENGTITDAVDCALDPLSETKCTLKSFTVEKGIYQTSNFRVQPTESIVRFPNITNLCPFGEVFNATRFASVYAWNRKRISNCVADYSVLYNSASFSTFKCYGVSPTKLNDLCFTNVYADSFVIRGDEVRQIAPGQTGKIADYNYKLPDDFTGCVIAWNSNNLDSKVGGNYNYLYRLFRKSNLKPFERDISTEIYQAGSTPCNGVKGFNCYFPLQSYGFQPTNGVGYQPYRVVVLSFELLHAPATVCGPKKSTNLVKNKCVNFNFNGLTGTGVLTESNKKFLPFQQFGRDIADTTDAVRDPQTLEILDITPCSFGGVSVITPGTNTSNQVAVLYQGVNCTEVPVAIHADQLTPTWRVYSTGSNVFQTRAGCLIGAEHVNNSYECDIPIGAGICASYQTQTNSPGSASSVASQSIIAYTMSLGVENSVAYSNNSIAIPTNFTISVTTEILPVSMTKTSVDCTMYICGDSTECSNLLLQYGSFCTQLNRALTGIAVEQDKNTQEVFAQVKQIYKTPPIKDFGGFNFSQILPDPSKPSKRSPIEDLLFNKVTLADAGFIKQYGDCLGDIAARDLICAQKFNGLTVLPPLLTDEMIAQYTSALLAGTITSGWTFGAGPALQIPFPMQMAYRFNGIGVTQNVLYENQKLIANQFNSAIGKIQDSLSSTPSALGKLQDVVNQNAQALNTLVKQLSSNFGAISSVLNDILSRLDPPEAEVQIDRLITGRLQSLQTYVTQQLIRAAEIRASANLAATKMSECVLGQSKRVDFCGKGYHLMSFPQSAPHGVVFLHVTYVPAQEKNFTTAPAICHDGKAHFPREGVFVSNGTHWFVTQRNFYEPQIITTDNTFVSGNCDVVIGIVNNTVYDPLQPELDSFKEELDKYFKNHTSPDVDLGDISGINASVVNIQKEIDRLNEVAKNLNESLIDLQELGKYGSGSGSGSGSGSGSGSGSGSGSGSMENTTSGFLGPLLVLQAGFFLLTRILTIPQSLDSWWTSLNFLGGAPTCPGQNSRSPTSNHSPTSCPPICPGYRWMCLRRFIIFLFILLLCLIFLLVLLDYQGMLPVCPLLPGTSTTSTGPCKTCTNPANGTSMFPSCCCTKPSDGNCTCIPIPSSWAFARFLWEWASVRFSWLSFLVPFVQWFVGLSPTVWLSVMWMMWYWGPSLYNILSPFLPLLPIFFCLWVYI

SEQ ID NO: 96 - protein, 1456 aa, synthetic construct
  REGION 1..1456: note = Recombinant Sequence
MFVFLVLLPLVSIQCVNLTTRTQLPPAYTNSFTRGVYYPDKVFRSSVLHSTQDLFLPFFSNVTWFHAIHVSGTNGTKRFDNPVLPFNDGVYFASTEKSNIIRGWIFGTTLDSKTQSLLIVNNATNVVIKVCEFQFCNDPFLGVYYHKNNKSCMESEFRVYSSANNCTFEYVSQPFLMDLEGKQGNFKNLREFVFKNIDGYFKIYSKHTPINLVRDLPQGFSALEPLVDLPIGINITRFQTLLALHRSYLTPGDSSSGWTAGAAAYYVGYLQPRTFLLKYNENGTITDAVDCALDPLSETKCTLKSFTVEKGIYQTSNFRVQPTESIVRFPNITNLCPFGEVFNATRFASVYAWNRKRISNCVADYSVLYNSASFSTFKCYGVSPTKLNDLCFTNVYADSFVIRGDEVRQIAPGQTGKIADYNYKLPDDFTGCVIAWNSNNLDSKVGGNYNYRYRLFRKSNLKPFERDISTEIYQAGSTPCNGVEGFNCYFPLQSYGFQPTNGVGYQPYRVVVLSFELLHAPATVCGPKKSTNLVKNKCVNFNFNGLTGTGVLTESNKKFLPFQQFGRDIADTTDAVRDPQTLEILDITPCSFGGVSVITPGTNTSNQVAVLYQGVNCTEVPVAIHADQLTPTWRVYSTGSNVFQTRAGCLIGAEHVNNSYECDIPIGAGICASYQTQTNSPGSASSVASQSIIAYTMSLGAENSVAYSNNSIAIPTNFTISVTTEILPVSMTKTSVDCTMYICGDSTECSNLLLQYGSFCTQLNRALTGIAVEQDKNTQEVFAQVKQIYKTPPIKDFGGFNFSQILPDPSKPSKRSPIEDLLFNKVTLADAGFIKQYGDCLGDIAARDLICAQKFNGLTVLPPLLTDEMIAQYTSALLAGTITSGWTFGAGPALQIPFPMQMAYRFNGIGVTQNVLYENQKLIANQFNSAIGKIQDSLSSTPSALGKLQDVVNQNAQALNTLVKQLSSNFGAISSVLNDILSRLDPPEAEVQIDRLITGRLQSLQTYVTQQLIRAAEIRASANLAATKMSECVLGQSKRVDFCGKGYHLMSFPQSAPHGVVFLHVTYVPAQEKNFTTAPAICHDGKAHFPREGVFVSNGTHWFVTQRNFYEPQIITTDNTFVSGNCDVVIGIVNNTVYDPLQPELDSFKEELDKYFKNHTSPDVDLGDISGINASVVNIQKEIDRLNEVAKNLNESLIDLQELGKYGSGSGSGSGSGSGSGSGSGSGSGSMENTTSGFLGPLLVLQAGFFLLTRILTIPQSLDSWWTSLNFLGGAPTCPGQNSRSPTSNHSPTSCPPICPGYRWMCLRRFIIFLFILLLCLIFLLVLLDYQGMLPVCPLLPGTSTTSTGPCKTCTNPANGTSMFPSCCCTKPSDGNCTCIPIPSSWAFARFLWEWASVRFSWLSFLVPFVQWFVGLSPTVWLSVMWMMWYWGPSLYNILSPFLPLLPIFFCLWVYI

SEQ ID NO: 97 - protein, 1455 aa, synthetic construct
  REGION 1..1455: note = Recombinant Sequence
MFVFLVLLPLVSSQCVNLTTRTQLPPAYTNSFTRGVYYPDKVFRSSVLHSTQDLFLPFFSNVTWFHAIHVSGTNGTKRFGNPVLPFNDGVYFASTEKSNIIRGWIFGTTLDSKTQSLLIVNNATNVVIKVCEFQFCNDPFLGVYHKNNKSWMESESRVYSSANNCTFEYVSQPFLMDLEGKQGNFKNLREFVFKNIDGYFKIYSKHTPINLVRDLPQGFSALEPLVDLPIGINITRFQTLLALHRSYLTPGDSSSGWTAGAAAYYVGYLQPRTFLLKYNENGTITDAVDCALDPLSETKCTLKSFTVEKGIYQTSNFRVQPTESIVRFPNITNLCPFGEVFNATRFASVYAWNRKRISNCVADYSVLYNSASFSTFKCYGVSPTKLNDLCFTNVYADSFVIRGDEVRQIAPGQTGKIADYNYKLPDDFTGCVIAWNSNNLDSKVGGNYNYRYRLFRKSNLKPFERDISTEIYQAGSTPCNGVEGFNCYFPLQSYGFQPTNGVGYQPYRVVVLSFELLHAPATVCGPKKSTNLVKNKCVNFNFNGLTGTGVLTESNKKFLPFQQFGRDIADTTDAVRDPQTLEILDITPCSFGGVSVITPGTNTSNQVAVLYQGVNCTEVPVAIHADQLTPTWRVYSTGSNVFQTRAGCLIGAEHVNNSYECDIPIGAGICASYQTQTNSPGSASSVASQSIIAYTMSLGAENSVAYSNNSIAIPTNFTISVTTEILPVSMTKTSVDCTMYICGDSTECSNLLLQYGSFCTQLNRALTGIAVEQDKNTQEVFAQVKQIYKTPPIKDFGGFNFSQILPDPSKPSKRSPIEDLLFNKVTLADAGFIKQYGDCLGDIAARDLICAQKFNGLNVLPPLLTDEMIAQYTSALLAGTITSGWTFGAGPALQIPFPMQMAYRFNGIGVTQNVLYENQKLIANQFNSAIGKIQDSLSSTPSALGKLQHVVNQNAQALNTLVKQLSSNFGAISSVLNDILSRLDPPEAEVQIDRLITGRLQSLQTYVTQQLIRAAEIRASANLAATKMSECVLGQSKRVDFCGKGYHLMSFPQSAPHGVVFLHVTYVPAQEKNFTTAPAICHDGKAHFPREGVFVSNGTHWFVTQRNFYEPQIITTDNTFVSGNCDVVIGIVNNTVYDPLQPELDSFKEELDKYFKNHTSPDVDLGDISGINASVVNIQKEIDRLNEVAKNLNESLIDLQELGKYGSGSGSGSGSGSGSGSGSGSGSGSMENTTSGFLGPLLVLQAGFFLLTRILTIPQSLDSWWTSLNFLGGAPTCPGQNSRSPTSNHSPTSCPPICPGYRWMCLRRFIIFLFILLLCLIFLLVLLDYQGMLPVCPLLPGTSTTSTGPCKTCTNPANGTSMFPSCCCTKPSDGNCTCIPIPSSWAFARFLWEWASVRFSWLSFLVPFVQWFVGLSPTVWLSVMWMMWYWGPSLYNILSPFLPLLPIFFCLWVYI

SEQ ID NO: 98 - protein, 1456 aa, synthetic construct
  REGION 1..1456: note = Recombinant Sequence
MFVFLVLLPLVSSQCVNLTTRTQLPPAYTNSFTRGVYYPDKVFRSSVLHSTQDLFLPFFSNVTWFHAIHVSGTNGTKRFDNPVLPFNDGVYFASTEKSNIIRGWIFGTTLDSKTQSLLIVNNATNVVIKVCEFQFCNDPFLGVYYHKNNKSWMESEFRVYSSANNCTFEYVSQPFLMDLEGKQGNFKNLREFVFKNIDGYFKIYSKHTPINLVRDLPQGFSALEPLVDLPIGINITRFQTLLALHRSYLTPGDSSSGWTAGAAAYYVGYLQPRTFLLKYNENGTITDAVDCALDPLSETKCTLKSFTVEKGIYQTSNFRVQPTESIVRFPNITNLCPFGEVFNATRFASVYAWNRKRISNCVADYSVLYNSASFSTFKCYGVSPTKLNDLCFTNVYADSFVIRGDEVRQIAPGQTGKIADYNYKLPDDFTGCVIAWNSNNLDSKVGGNYNYLYRLFRKSNLKPFERDISTEIYQAGSTPCNGVKGFNCYFPLQSYGFQPTNGVGYQPYRVVVLSFELLHAPATVCGPKKSTNLVKNKCVNFNFNGLTGTGVLTESNKKFLPFQQFGRDIADTTDAVRDPQTLEILDITPCSFGGVSVITPGTNTSNQVAVLYQGVNCTEVPVAIHADQLTPTWRVYSTGSNVFQTRAGCLIGAEHVNNSYECDIPIGAGICASYQTQTNSPGSASSVASQSIIAYTMSLGAENSVAYSNNSIAIPTNFTISVTTEILPVSMTKTSVDCTMYICGDSTECSNLLLQYGSFCTQLNRALTGIAVEQDKNTQEVFAQVKQIYKTPPIKDFGGFNFSQILPDPSKPSKRSPIEDLLFNKVTLADAGFIKQYGDCLGDIAARDLICAQKFNGLTVLPPLLTDEMIAQYTSALLAGTITSGWTFGAGPALQIPFPMQMAYRFNGIGVTQNVLYENQKLIANQFNSAIGKIQDSLSSTPSALGKLQDVVNQNAQALNTLVKQLSSNFGAISSVLNDILSRLDPPEAEVQIDRLITGRLQSLQTYVTQQLIRAAEIRASANLAATKMSECVLGQSKRVDFCGKGYHLMSFPQSAPHGVVFLHVTYVPAQEKNFTTAPAICHDGKAHFPREGVFVSNGTHWFVTQRNFYEPQIITTDNTFVSGNCDVVIGIVNNTVYDPLQPELDSFKEELDKYFKNHTSPDVDLGDISGINASFVNIQKEIDRLNEVAKNLNESLIDLQELGKYGSGSGSGSGSGSGSGSGSGSGSGSMENTTSGFLGPLLVLQAGFFLLTRILTIPQSLDSWWTSLNFLGGAPTCPGQNSRSPTSNHSPTSCPPICPGYRWMCLRRFIIFLFILLLCLIFLLVLLDYQGMLPVCPLLPGTSTTSTGPCKTCTNPANGTSMFPSCCCTKPSDGNCTCIPIPSSWAFARFLWEWASVRFSWLSFLVPFVQWFVGLSPTVWLSVMWMMWYWGPSLYNILSPFLPLLPIFFCLWVYI

SEQ ID NO: 99 - protein, 1456 aa, synthetic construct
  REGION 1..1456: note = Recombinant Sequence
MFVFLVLLPLVSSQCVNLTTRTQLPPAYTNSFTRGVYYPDKVFRSSVLHSTQDLFLPFFSNVTWFHAIHVSGTNGTKRFDNPVLPFNDGVYFASTEKSNIIRGWIFGTTLDSKTQSLLIVNNATNVVIKVCEFQFCNDPFLGVYYHKNNKSWMESELRVYSSANNCTFEYVSQPFLMDLEGKQGNFKNLREFVFKNIDGYFKIYSKHTPINLVRDLPQGFSALEPLVDLPIGINITRFQTLLALHRSYLTPGDSSSGWTAGAAAYYVGYLQPRTFLLKYNENGTITDAVDCALDPLSETKCTLKSFTVEKGIYQTSNFRVQPTESIVRFPNITNLCPFGEVFNATRFASVYAWNRKRISNCVADYSFLYNSASFSTFKCYGVSPTKLNDLCFTNVYADSFVIRGDEVRQIAPGQTGKIADYNYKLPDDFTGCVIAWNSNNLDSKVGGNYNYLYRLFRKSNLKPFERDISTEIYQAGSTPCNGVEGFNCYFPLQSYGFQPTNGVGYQPYRVVVLSFELLHAPATVCGPKKSTNLVKNKCVNFNFNGLTGTGVLTESNKKFLPFQQFGRDIADTTDAVRDPQTLEILDITPCSFGGVSVITPGTNTSNQVAVLYHGVNCTEVPVAIHADQLTPTWRVYSTGSNVFQTRAGCLIGAEHVNNSYECDIPIGAGICASYQTQTNSRGSASSVASQSIIAYTMSLGAENSVAYSNNSIAIPTNFTISVTTEILPVSMTKTSVDCTMYICGDSTECSNLLLQYGSFCTQLNRALTGIAVEQDKNTQEVFAQVKQIYKTPPIKDFGGFNFSQILPDPSKPSKRSPIEDLLFNKVTLADAGFIKQYGDCLGDIAARDLICAQKFNGLTVLPPLLTDEMIAQYTSALLAGTITSGWTFGAGPALQIPFPMQMAYRFNGIGVTQNVLYENQKLIANQFNSAIGKIQDSLSSTPSALGKLQDVVNQNAQALNTLVKQLSSNFGAISSVLNDILSRLDPPEAEVQIDRLITGRLQSLQTYVTQQLIRAAEIRASANLAATKMSECVLGQSKRVDFCGKGYHLMSFPQSAPHGVVFLHVTYVPAQEKNFTTAPAICHDGKAHFPREGVFVSNGTHWFVTQRNFYEPQIITTDNTFVSGNCDVVIGIVNNTVYDPLQPELDSFKEELDKYFKNHTSPDVDLGDISGINASVVNIQKEIDRLNEVAKNLNESLIDLQELGKYGSGSGSGSGSGSGSGSGSGSGSGSMENTTSGFLGPLLVLQAGFFLLTRILTIPQSLDSWWTSLNFLGGAPTCPGQNSRSPTSNHSPTSCPPICPGYRWMCLRRFIIFLFILLLCLIFLLVLLDYQGMLPVCPLLPGTSTTSTGPCKTCTNPANGTSMFPSCCCTKPSDGNCTCIPIPSSWAFARFLWEWASVRFSWLSFLVPFVQWFVGLSPTVWLSVMWMMWYWGPSLYNILSPFLPLLPIFFCLWVYI

SEQ ID NO: 100 - protein, 1456 aa, synthetic construct
  REGION 1..1456: note = Recombinant Sequence
MFVFFVLLPLVSSQCVNLTTRTQLPPAYTNSFTRGVYYPDKVFRSSVLHSTQDLFLPFFSNVTWFHAIHVSGTNGTKRFDNPVLPFNDGVYFASIEKSNIIRGWIFGTTLDSKTQSLLIVNNATNVVIKVCEFQFCNDPFLGVYYHKNNKSWMESEFRVYSSANNCTFEYVSQPFLMDLEGKQGNFKNLREFVFKNIDGYFKIYSKHTPINLVRDLPQGFSALEPLVDLPIGINITRFQTLLALHRSYLTPGGSSSGWTAGAAAYYVGYLQPRTFLLKYNENGTITDAVDCALDPLSETKCTLKSFTVEKGIYQTSNFRVQPTESIVRFPNITNLCPFGEVFNATRFASVYAWNRKRISNCVADYSVLYNSASFSTFKCYGVSPTKLNDLCFTNVYADSFVIRGDEVRQIAPGQTGKIADYNYKLPDDFTGCVIAWNSNNLDSKVGGNYNYLYRLFRKSNLKPFERDISTEIYQAGNTPCNGVEGFNCYFPLQSYGFQPTNGVGYQPYRVVVLSFELLHAPATVCGPKKSTNLVKNKCVNFNFNGLTGTGVLTESNKKFLPFQQFGRDIADTTDAVRDPQTLEILDITPCSFGGVSVITPGTNTSNQVAVLYQGVNCTEVPVAIHADQLTPTWRVYSTGSNVFQTRAGCLIGAEHVNNSYECDIPIGAGICASYQTQTNSPGSASSVASQSIIAYTMSLGAENSVAYSNNSIAIPTNFTISVTTEILPVSMTKTSVDCTMYICGDSTECSNLLLQYGSFCTQLNRALTGIAVEQDKNTQEVFAQVKQIYKTPPIKDFGGFNFSQILPDPSKPSKRSPIEDLLFNKVTLADAGFIKQYGDCLGDIAARDLICAQKFNGLTVLPPLLTDEMIAQYTSALLAGTITSGWTFGAGPALQIPFPMQMAYRFNGIGVTQNVLYENQKLIANQFNSAIGKIQDSLSSTPSALGKLQDVVNQNARALNTLVKQLSSNFGAISSVLNDILSRLDPPEAEVQIDRLITGRLQSLQTYVTQQLIRAAEIRASANLAATKMSECVLGQSKRVDFCGKGYHLMSFPQSAPHGVVFLHVTYVPAQEKNFTTAPAICHDGKAHFPREGVFVSNGTHWFVTQRNFYEPQIITTDNTFVSGNCDVVIGIVNNTVYDPLQPELDSFKEELDKYFKNHTSPDVDLGDISGINASVVNIQKEIDRLNEVAKNLNESLIDLQELGKYGSGSGSGSGSGSGSGSGSGSGSGSMENTTSGFLGPLLVLQAGFFLLTRILTIPQSLDSWWTSLNFLGGAPTCPGQNSRSPTSNHSPTSCPPICPGYRWMCLRRFIIFLFILLLCLIFLLVLLDYQGMLPVCPLLPGTSTTSTGPCKTCTNPANGTSMFPSCCCTKPSDGNCTCIPIPSSWAFARFLWEWASVRFSWLSFLVPFVQWFVGLSPTVWLSVMWMMWYWGPSLYNILSPFLPLLPIFFCLWVYI

SEQ ID NO: 101 - protein, 1451 aa, synthetic construct
  REGION 1..1451: note = Recombinant Sequence
MFVFLVLLPLVSSQCVNLTTRTQLPPAYTNSFTRGVYYPDKVFRSSVLHSTQDLFLPFFSNVTWFHAIHVSGTNGTKRFDNPVLPFNDGVYFASTEKSNIIRGWIFGTTLDSKTQSLLIVNNATNVVIKVCEFQFCNDPFYYHKNNKSWMESEFRVYSSANNCTFEYVSQPFLMDLEGKQGNFKNLREFVFKNIDGYFKIYSKHTPINLVRDLPQGFSALEPLVDLPIGINITRFQTLLHRSYLTPGDSSSGWTAGAAACYVGYLQPRTFLLKYNENGTITDAVDCALDPLSETKCTLKSFTVEKGIYQTSNFRVQPTESIVRFPNITNLCPFGEVFNATRFASVYAWNRKRISNCVADYSVLYNSASFSTFKCYGVSPTKLNDLCFTNVYADSFVIRGDEVRQIAPGQTGKIADYNYKLPDDFTGCVIAWNSNNLDSKVGGNYNYLYRLFRKSNLKPFERDISTEIYQAGSTPCNGVKGFNCYFPLQSYGFQPTYGVGYQPYRVVVLSFELLHAPATVCGPKKSTNLVKNKCVNFNFNGLTGTGVLTESNKKFLPFQQFGRDIADTTDAVRDPQTLEILDITPCSFGGVSVITPGTNTSNQVAVLYQGVNCTEVPVAIHADQLTPTWRVYSTGSNVFQTRAGCLIGAEHVNNSYECDIPIGAGICASYQTQTNSHGSASSVASQSIIAYTMSLGAENSVAYSNNSIAIPTNFTISVTTEILPVSMTKTSVDCTMYICGDSTECSNLLLQYGSFCTQLNRALTGIAVEQDKNTQEVFAQVKQIYKTPPIKDFGGFNFSQILPDPSKPSKRSPIEDLLFNKVTLADAGFIKQYGDCLGDIAARDLICAQKFNGLTVLPPLLTDEMIAQYTSALLAGTITSGWTFGAGPALQIPFPMQMAYRFNGIGVTQNVLYENQKLIANQFNSAIGKIQDSLSSTPSALGKLQDVVNQNAQALNTLVKQLSSNFGAISSVLNDILSRLDPPEAEVQIDRLITGRLQSLQTYVTQQLIRAAEIRASANLAATKMSECVLGQSKRVDFCGKGYHLMSFPQSAPHGVVFLHVTYVPAQEKNFTTAPAICHDGKAHFPRKGVFVSNGTYWFVTQRNFYEPQIITTDNTFVSGNCDVVIGIVNNTVYDPLQPELDSFKEELDKYFKNHTSPDVDLGDISGINASFVNIQKEIDRLNEVAKNLNESLIDLQELGKYGSGSGSGSGSGSGSGSGSGSGSGSMENTTSGFLGPLLVLQAGFFLLTRILTIPQSLDSWWTSLNFLGGAPTCPGQNSRSPTSNHSPTSCPPICPGYRWMCLRRFIIFLFILLLCLIFLLVLLDYQGMLPVCPLLPGTSTTSTGPCKTCTNPANGTSMFPSCCCTKPSDGNCTCIPIPSSWAFARFLWEWASVRFSWLSFLVPFVQWFVGLSPTVWLSVMWMMWYWGPSLYNILSPFLPLLPIFFCLWVYI

SEQ ID NO: 102 - protein, 1456 aa, synthetic construct
  REGION 1..1456: note = Recombinant Sequence
MFVFLVLLPLVSSQCVNFTTRTQLPPAYTNSFTRGVYYPDKVFRSSVLHSTQDLFLPFFSNVTWFHAIHVSGTNGTKRFDNPVLPFNDGVYFASTEKSNIIRGWIFGTTLDSKTQSLLIVNNATNVVIKVCEFQFCNDPFLGVYYHKNNKSWMESEFRVYSSANNCTFEYVSQPFLMDLEGKQGNFKNLREFVFKNIDGYFKIYSKHTPINLVRDLPQGFSALEPLVDLPIGINITRFQTLLALHRSYLTPGDSSSGWTAGAAAYYVGYLQPRTFLLKYNENGTITDAVDCALDPLSETKCTLKSFTVEKGIYQTSNFRVQPTESIVRFPNITNLCPFGEVFNATRFASVYAWNRKRISNCVADYSVLYNSASFSTFKCYGVSPTKLNDLCFTNVYADSFVIRGDEVRQIAPGQTGKIADYNYKLPDDFTGCVIAWNSNNLDSKVGGNYNYRYRLFRKSNLKPFERDISTEIYQAGSTPCNGVEGFNCYFPLQSYGFQPTYGVGYQPYRVVVLSFELLHAPATVCGPKKSTNLVKNKCVNFNFNGLTGTGVLTESNKKFLPFQQFGRDIADTTDAVRDPQTLEILDITPCSFGGVSVITPGTNTSNQVAVLYQGVNCTEVPVAIHADQLTPTWRVYSTGSNVFQTRAGCLIGVEYVNNSYECDIPIGAGICASYQTQTNSPGSASSVASQSIIAYTMSLGAENSVAYSNNSIAIPTNFTISVTTEILPVSMTKTSVDCTMYICGDSTECSNLLLQYGSFCTQLNRALTGIAVEQDKNTQEVFAQVKQIYKTPPIKYFGGFNFSQILPDPSKPSKRSPIEDLLFNKVTLADAGFIKQYGDCLGDIAARDLICAQKFNGLTVLPPLLTDEMIAQYTSALLAGTITSGWTFGAGPALQIPFPMQMAYRFNGIGVTQNVLYENQKLIANQFNSAIGKIQDSLSSTPSALGKLQDVVNQNAQALNTLVKQLSSNFGAISSVLNDILSRLDPPEAEVQIDRLITGRLQSLQTYVTQQLIRAAEIRASANLAATKMSECVLGQSKRVDFCGKGYHLMSFPQSAPHGVVFLHVTYVPAQEKNFTTAPAICHDGKAHFPREGVFVSNGTHWFVTQRNFYEPQIITTDNTFVSGNCDVVIGIVNNTVYDPLQPELDSFKEELDKYFKNHTSPDVDLGDISGINASVVNIQKEIDRLNEVAKNLNESLIDLQELGKYGSGSGSGSGSGSGSGSGSGSGSGSMENTTSGFLGPLLVLQAGFFLLTRILTIPQSLDSWWTSLNFLGGAPTCPGQNSRSPTSNHSPTSCPPICPGYRWMCLRRFIIFLFILLLCLIFLLVLLDYQGMLPVCPLLPGTSTTSTGPCKTCTNPANGTSMFPSCCCTKPSDGNCTCIPIPSSWAFARFLWEWASVRFSWLSFLVPFVQWFVGLSPTVWLSVMWMMWYWGPSLYNILSPFLPLLPIFFCLWVYI

SEQ ID NO: 103 - protein, 1456 aa, synthetic construct
  REGION 1..1456: note = Recombinant Sequence
MFVFLVLLPLVSSQCVNLTTRTQLPPAYTNSFTRGVYYPDKVFRSSVLHSTQDLFLPFFSNVTWFHAIHVSGTNGTKRFDNPVLPFNDGVYFASTEKSNIIRGWIFGTTLDSKTQSLLIVNNATNVVIKVCEFQFCNDPFLGVYYHKNNKSWMESEFRVYSSANNCTFEYVSQPFLMDLEGKQGNFKNLREFVFKNIDGYFKIYSKHTPINLVRDLPQGFSALEPLVDLPIGINITRFQTLLALHRSYLTPGDSSSGWTAGAAAYYVGYLQPRTFLLKYNENGTITDAVDCALDPLSETKCTLKSFTVEKGIYQTSNFRVQPTESIVRFPNITNLCPFGEVFNATRFASVYAWNRKRISNCVADYSVLYNSASFSTFKCYGVSPTKLNDLCFTNVYADSFVIRGDEVRQIAPGQTGKIADYNYKLPDDFTGCVIAWNSNNLDSKVGGNYNYLYRLFRKSNLKPFERDISTEIYQAGSTPCNGVEGFNCYFPLQSYGFQPTTGVGYQPYRVVVLSFELLHAPATVCGPKKSTNLVKNKCVNFNFNGLTGTGVLTESNKKFLPFQQFGRDIADTTDAVRDPQTLEILDITPCSFGGVSVITPGTNTSNQVAVLYQDVNCTEVPVAIHADQLTPTWRVYSTGSNVFQTRAGCLIGAEHVNNSYECDIPIGAGICASYQTQTNSPGSASSVASQSIIAYTMSLGAENSVAYSNNSIAIPTNFTISVTTEILPVSMTKTSVDCTMYICGDSTECSNLLLQYGSFCTQLNRALTGIAVEQDKNTQEVFAQVKQIYKTPPIKDFGGFNFSQILPDPSKPSKRSPIEDLLFNKVTLADAGFIKQYGDCLGDIAARDLICAQKFNGLTVLPPLLTDEMIAQYTSALLAGTITSGWTFGAGPALQIPFPMQMAYRFNGIGVTQNVLYENQKLIANQFNSAIGKIQDSLSSTPSALGKLQDVVNQNAQALNTLVKQLSSNFGAISSVLNDILSRLDPPEAEVQIDRLITGRLQSLQTYVTQQLIRAAEIRASANLAATKMSECVLGQSKRVDFCGKGYHLMSFPQSAPHGVVFLHVTYVPAQEKNFTTAPAICHDGKAHFPREGVFVSNGTHWFVTQRNFYEPQIITTDNTFVSGNCDVVIGIVNNTVYDPLQPELDSFKEELDKYFKNHTSPDVDLGDISGINASVVNIQKEIDRLNEVAKNLNESLIDLQELGKYGSGSGSGSGSGSGSGSGSGSGSGSMENTTSGFLGPLLVLQAGFFLLTRILTIPQSLDSWWTSLNFLGGAPTCPGQNSRSPTSNHSPTSCPPICPGYRWMCLRRFIIFLFILLLCLIFLLVLLDYQGMLPVCPLLPGTSTTSTGPCKTCTNPANGTSMFPSCCCTKPSDGNCTCIPIPSSWAFARFLWEWASVRFSWLSFLVPFVQWFVGLSPTVWLSVMWMMWYWGPSLYNILSPFLPLLPIFFCLWVYI

SEQ ID NO: 104 - protein, 1456 aa, synthetic construct
  REGION 1..1456: note = Recombinant Sequence
MFVFFVLLPLVSSQCVNLTTRTQLPPAYTNSFTRGVYYPDKVFRSSVLHSTQDLFLPFFSNVTWFHAIHVSGTNGTKRFDNPVLPFNDGVYFASIEKSNIIRGWIFGTTLDSKTQSLLIVNNATNVVIKVCEFQFCNDPFLGVYYHKNNKSWMESEFRVYSSANNCTFEYVSQPFLMDLEGKQGNFKNLREFVFKNIDGYFKIYSKHTPINLVRDLPQGFSALEPLVDLPIGINITRFQTLLALHRSYLTPGGSSSGWTAGAAAYYVGYLQPRTFLLKYNENGTITDAVDCALDPLSETKCTLKSFTVEKGIYQTSNFRVQPTESIVRFPNITNLCPFGEVFNATRFASVYAWNRKRISNCVADYSVLYNSASFSTFKCYGVSPTKLNDLCFTNVYADSFVIRGDEVRQIAPGQTGKIADYNYKLPDDFTGCVIAWNSNNLDSKVGGNYNYLYRLFRKSNLKPFERDISTEIYQAGSTPCNGVEGFNCYFPLQSYGFQPTNGVGYQPYRVVVLSFELLHAPATVCGPKKSTNLVKNKCVNFNFNGLTGTGVLTESNKKFLPFQQFGRDIADTTDAVRDPQTLEILDITPCSFGGVSVITPGTNTSNQVAVLYQGVNCTEVPVAIHADQLTPTWRVYSTGSNVFQTRAGCLIGAEHVNNSYECDIPIGAGICASYQTQTNSPGSASSVASQSIIAYTMSLGVENSVAYSNNSIAIPTNFTISVTTEILPVSMTKTSVDCTMYICGDSTECSNLLLQYGSFCTQLNRALTGIAVEQDKNTQEVFAQVKQIYKTPPIKDFGGFNFSQILPDPSKPSKRSPIEDLLFNKVTLADAGFIKQYGDCLGDIAARDLICAQKFNGLTVLPPLLTDEMIAQYTSALLAGTITSGWTFGAGPALQIPFPMQMAYRFNGIGVTQNVLYENQKLIANQFNSAIGKIQDSLSSTPSALGKLQDVVNQNAQALNTLVKQLSSNFGAISSVLNDILSRLDPPEAEVQIDRLITGRLQSLQTYVTQQLIRAAEIRASANLAATKMSECVLGQSKRVDFCGKGYHLMSFPQSAPHGVVFLHVTYVPAQEKNFTTAPAICHDGKAHFPREGVFVSNGTHWFVTQRNFYEPQIITTDNTFVSGNCDVVIGIVNNTVYDPLQPELDSFKEELDKYFKNHTSPDVDLGDISGINASVVNIQKEIDRLNEVAKNLNESLIDLQELGKYGSGSGSGSGSGSGSGSGSGSGSGSMENTTSGFLGPLLVLQAGFFLLTRILTIPQSLDSWWTSLNFLGGAPTCPGQNSRSPTSNHSPTSCPPICPGYRWMCLRRFIIFLFILLLCLIFLLVLLDYQGMLPVCPLLPGTSTTSTGPCKTCTNPANGTSMFPSCCCTKPSDGNCTCIPIPSSWAFARFLWEWASVRFSWLSFLVPFVQWFVGLSPTVWLSVMWMMWYWGPSLYNILSPFLPLLPIFFCLWVYI

SEQ ID NO: 105 - protein, 1456 aa, synthetic construct
  REGION 1..1456: note = Recombinant Sequence
MFVFLVLLPLVSSQCVNLTTRTQLPPAYTNSFTRGVYYPDKVFRSSVLHSTQDLFLPFFSNVTWFHAIHVSGTNGTKRFDNPVLPFNDGVYFASTEKSNIIRGWIFGTTLDSKTQSLLIVNNATNVVIKVCEFQFCNDPFLSVYYHKNNKSWMESEFRVYSSANNCTFEYVSQPFLMDLVGKQGNFKNLREFVFKNIDGYFKIYSKHTPINLVRDLPQGFSALEPLVDLPIGINITRFQTLLALHRSYLTPGDSSSGWTAGAAAYYVGYLQPRTFLLKYNENGTITDAVDCALDPLSETKCTLKSFTVEKGIYQTSNFRVQPTESIVRFPNITNLCPFGEVFNATRFASVYAWNRKRISNCVADYSVLYNSASFSTFKCYGVSPTKLNDLCFTNVYADSFVIRGDEVRQIAPGQTGKIADYNYKLPDDFTGCVIAWNSNNLDSKVGGNYNYLYRLFRKSNLKPFERDISTEIYQAGSTPCNGVEGFNCYFPLQSYGFQPTNGVGYQPYRVVVLSFELLHAPATVCGPKKSTNLVKNKCVNFNFNGLTGTGVLTESNKKFLPFQQFGRDIADTTDAVRDPQTLEILDITPCSFGGVSVITPGTNTSNQVAVLYQGVNCTEVPVAIHADQLTPTWRVYSTGSNVFQTRAGCLIGAEHVNNSYECDIPIGAGICASYQTHTNSPGSASSVASQSIIAYTMSLGAENSVAYSNNSIAIPTNFTISVTTEILPVSMTKTSVDCTMYICGDSTECSNLLLQYGSFCTQLNRALTGIAVEQDKNTQEVFAQVKQIYKTPPIKDFGGFNFSQILPDPSKPSKRSPIEDLLFNKVTLADAGFIKQYGDCLGDIAARDLICAQKFNGLTVLPPLLTDEMIAQYTSALLAGTITSGWTFGAGPALQIPFPMQMAYRFNGIGVTQNVLYENQKLIANQFNSAIGKIQDSLSSTPSALGKLQDVVNQNAQALNTLVKQLSSNFGAISSVLNDILSRLDPPEAEVQIDRLITGRLQSLQTYVTQQLIRAAEIRASANLAATKMSECVLGQSKRVDFCGKGYHLMSFPQSAPHGVVFLHVTYVPAQEKNFTTAPAICHDGKAHFPREGVFVSNGTHWFVTQRNFYEPQIITTDNTFVSGNCDVVIGIVNNTVYDPLQPELDSFKEELDKYFKNHTSPDVDLGDISGINASVVNIQKEIDRLNEVAKNLNESLIDLQELGKYGSGSGSGSGSGSGSGSGSGSGSGSMENTTSGFLGPLLVLQAGFFLLTRILTIPQSLDSWWTSLNFLGGAPTCPGQNSRSPTSNHSPTSCPPICPGYRWMCLRRFIIFLFILLLCLIFLLVLLDYQGMLPVCPLLPGTSTTSTGPCKTCTNPANGTSMFPSCCCTKPSDGNCTCIPIPSSWAFARFLWEWASVRFSWLSFLVPFVQWFVGLSPTVWLSVMWMMWYWGPSLYNILSPFLPLLPIFFCLWVYI

SEQ ID NO: 106 - protein, 1456 aa, synthetic construct
  REGION 1..1456: note = Recombinant Sequence
MFVFLVLLPLVSSQCVNLTTRTQLPPAYTNSFTRGVYYPDKVFRSSVLHSTQDLFLPFFSNVTWFHAIHVSGTNGTKRFDNPVLPFNDGVYFASTEKSNIIRGWIFGTTLDSKTQSLLIVNNATNVVIKVCEFQFCNDPFLGVYYHKNNKSWMESEFRVYSSANNCTFEYVSQPFLMDLEGKQGNFKNLREFVFKNIDGYFKIYSKHTPINLVRDLPQGFSALEPLVDLPIGINITRFQTLLALHRSYLTPGDSSSGWTAGAAAYYVGYLQPRTFLLKYNENGTITDAVDCALDPLSETKCTLKSFTVEKGIYQTSNFRVQPTESIVRFPNITNLCPFGEVFNATRFASVYAWNRKRISNCVADYSVLYNSASFSTFKCYGVSPTKLNDLCFTNVYADSFVIRGDEVRQIAPGQTGKIADYNYKLPDDFTGCVIAWNSNNLDSKVGGNYNYLYRLFRKSNLKPFERDISTEIYQAGSTPCNGVKGFNCYFPLQPYGFQPTYGVGYQPYRVVVLSFELLHAPATVCGPKKSTNLVKNKCVNFNFNGLTGTGVLTESNKKFLPFQQFGRDIADTTDAVRDPQTLEILDITPCSFGGVSVITPGTNTSNQVAVLYQGVNCTEVPVAIHADQLTPTWRVYSTGSNVFQTRAGCLIGAEHVNNSYECDIPIGAGICASYQTQTNSHGSASSVASQSIIAYTMSLGAENSVAYSNNSIAIPTNFTISVTTEILPVSMTKTSVDCTMYICGDSTECSNLLLQYGSFCTQLNRALTGIAVEQDKNTQEVFAQVKQIYKTPPIKDFGGFNFSQILPDPSKPSKRSPIEDLLFNKVTLADAGFIKQYGDCLGDIAARDLICAQKFNGLTVLPPLLTDEMIAQYTSALLAGTITSGWTFGAGPALQIPFPMQMAYRFNGIGVTQNVLYENQKLIANQFNSAIGKIQDSLSSTPSALGKLQDVVNQNAQALNTLVKQLSSNFGAISSVLNDILSRLDPPEAEVQIDRLITGRLQSLQTYVTQQLIRAAEIRASANLAATKMSECVLGQSKRVDFCGKGYHLMSFPQSAPHGVVFLHVTYVPAQEKNFTTAPAICHDGKAHFPREGVFVSNGTHWFVTQRNFYKPQIITTDNTFVSGNCDVVIGIVNNTVYDPLQPELDSFKEELDKYFKNHTSPDVDLGDISGINASVVNIQKEIDRLNEVAKNLNESLIDLQELGKYGSGSGSGSGSGSGSGSGSGSGSGSMENTTSGFLGPLLVLQAGFFLLTRILTIPQSLDSWWTSLNFLGGAPTCPGQNSRSPTSNHSPTSCPPICPGYRWMCLRRFIIFLFILLLCLIFLLVLLDYQGMLPVCPLLPGTSTTSTGPCKTCTNPANGTSMFPSCCCTKPSDGNCTCIPIPSSWAFARFLWEWASVRFSWLSFLVPFVQWFVGLSPTVWLSVMWMMWYWGPSLYNILSPFLPLLPIFFCLWVYI

SEQ ID NO: 107 - protein, 1455 aa, synthetic construct
  REGION 1..1455: note = Recombinant Sequence
MFVFLVLLPLVSSQCVNLTTRTQLPPAYTNSFTRGVYYPDKVFRSSVLHSTQDLFLPFFSNVTWFDAIHVSGTNGTKRFDNPVLPFNDGVYFASTEKSNIIRGWIFGTTLDSKTQSLLIVNNATNVVIKVCEFQFCNDPFLVVYHKNNKSWMESEFRVYSSANNCTFEYVSQPFLMDLEGKQGNFKNLREFVFKNIDGYFKIYSKHTPINLVRGLPQGFSALEPLVDLPIGINITRFQTLLALHRSYLTPGDSSSGWTAGAAAYYVGYLQPRTFLLKYNENGTITDAVDCALDPLSETKCTLKSFTVEKGIYQTSNFRVQPTESIVRFPNITNLCPFGEVFNATRFASVYAWNRKRISNCVADYSVLYNSASFSTFKCYGVSPTKLNDLCFTNVYADSFVIRGDEVRQIAPGQTGKIADYNYKLPDDFTGCVIAWNSNNLDSKVGGNYNYLYRLFRKSNLKPFERDISTEIYQAGSTPCNGAEGFNCYFPLQSYGFQPTNGVGYQPYRVVVLSFELLHAPATVCGPKKSTNLVKNKCVNFNFNGLTGTGVLTESNKKFLPFQQFGRDIADTTDAVRDPQTLEILDITPCSFGGVSVITPGTNTSNQVAVLYQDVNCTEVPVAIHADQLTPTWRVYSTGSNVFQTRAGCLIGAEYVNNSYECDIPIGASICASYQTQTNSPGSASSVASQSIIAYTMSLGAENSVAYSNNSIAIPTNFTISVTTEILPVSMTKTSVDCTMYICGDSTECSNLLLQYGSFCTQLNRALTGIAVEQDKNTQEVFAQVKQIYKTPPIKDFGGFNFSQILPDPSKPSKRSPIEDLLFNKVTLADAGFIKQYGDCLGDIAARDLICAQKFNGLTVLPPLLTDEMIAQYTSALLAGTITSGWTFGAGPALQIPFPMQMAYRFNGIGVTQNVLYENQKLIANQFNSAIGKIQDSLSSTPSALGKLRDVVNQNAQALNTLVKQLSSNFGAISSVLNDILSRLDPPEAEVQIDRLITGRLQSLQTYVTQQLIRAAEIRASANLAATKMSECVLGQSKRVDFCGKGYHLMSFPQSAPHGVVFLHVTYVPAQEKNFTTAPAICHDGKDHFPREGVFVSNGTHWFVTQRNFYEPQIITTDNTFVSGNCDVVIGIVNNTVYDPLQPELDSFKEELDKYFKNHTSPDVDLGDISGINASVVNIQKEIDRLNEVAKNLNESLIDLQELGKYGSGSGSGSGSGSGSGSGSGSGSGSMENTTSGFLGPLLVLQAGFFLLTRILTIPQSLDSWWTSLNFLGGAPTCPGQNSRSPTSNHSPTSCPPICPGYRWMCLRRFIIFLFILLLCLIFLLVLLDYQGMLPVCPLLPGTSTTSTGPCKTCTNPANGTSMFPSCCCTKPSDGNCTCIPIPSSWAFARFLWEWASVRFSWLSFLVPFVQWFVGLSPTVWLSVMWMMWYWGPSLYNILSPFLPLLPIFFCLWVYI

SEQ ID NO: 108 - protein, 1456 aa, synthetic construct
  REGION 1..1456: note = Recombinant Sequence
MFVFLVLLPLVSSQCVNLTTRTQLPPAYTNSFTRGVYYPDKVFRSSVLHSTQDLFLPFFSNVTWFHAIHVSGTNGTKRFDNPVLPFNDGVYFASTEKSNIIRGWIFGTTLDSKTQSLLIVNNATNVVIKVCEFQFCNDPFLGVYYHKNNKSWMESEFRVYSSANNCTFEYVSQPFLMDLEGKQGNFKNLREFVFKNIDGYFKIYSKHTPINLVRDLPQGFSALEPLVDLPIGINITRFQTLLALHRSYLTPGDSSSGWTAGAAAYYVGYLQPRTFLLKYNENGTITDAVDCALDPLSETKCTLKSFTVEKGIYQTSNFRVQPTESIVRFPNITNLCPFGEVFNATRFASVYAWNRKRISNCVADYSVLYNSASFSTFKCYGVSPTKLNDLCFTNVYADSFVIRGDEVRQIAPGQTGKIADYNYKLPDDFTGCVIAWNSNNLDSKVGGNYNYLYRLFRKSNLKPFERDISTEIYQAGSTPCNGVEGFNCYFPLQPYGFQPTNGVGYQPYRVVVLSFELLHAPATVCGPKKSTNLVKNKCVNFNFNGLTGTGVLTESNKKFLPFQQFGRDIADTTDAVRDPQTLEILDITPCSFGGVSVITPGTNTSNQVAVLYQGVNCTEVPVAIHADQLTPTWRVYSTGSNVFQTRAGCLIGAEHVNNSYECDIPIGAGICASYQTQTNSHGSASSVASQSIIAYTMSLGAENSVAYSNNSIAIPINFTISVTTEILPVSMTKTSVDCTMYICGDSTECSNLLLQYGSFCTQLNRALTGIAVEQDKNTQEVFAQVKQIYKTPPIKDFGGFNFSQILPDPSKPSKRSPIEDLLFNKVTLADAGFIKQYGDCLGDIAARDLICAQKFNGLTVLPPLLTDEMIAQYTSALLAGTITSGWTFGAGPALQIPFPMQMAYRFNGIGVTQNVLYENQKLIANQFNSAIGKIQDSLSSTPSALGKLQDVVNQNAQALNTLVKQLSSNFGAISSVLNDILSRLDPPEAEVQIDRLITGRLQSLQTYVTQQLIRAAEIRASANLAATKMSECVLGQSKRVDFCGKGYHLMSFPQSAPHGVVFLHVTYVPAQEKNFTTAPAICHDGKAHFPREGVFVSNGTHWFVTQRNFYEPQIITTDNTFVSGNCDVVIGIVNNTVYDPLQPELDSFKEELDKYFKNHTSPDVDLGDISGINASVVNIQKEIDRLNEVAKNLNESLIDLQELGKYGSGSGSGSGSGSGSGSGSGSGSGSMENTTSGFLGPLLVLQAGFFLLTRILTIPQSLDSWWTSLNFLGGAPTCPGQNSRSPTSNHSPTSCPPICPGYRWMCLRRFIIFLFILLLCLIFLLVLLDYQGMLPVCPLLPGTSTTSTGPCKTCTNPANGTSMFPSCCCTKPSDGNCTCIPIPSSWAFARFLWEWASVRFSWLSFLVPFVQWFVGLSPTVWLSVMWMMWYWGPSLYNILSPFLPLLPIFFCLWVYI

SEQ ID NO: 109 - protein, 1462 aa, synthetic construct
  REGION 1..1462: note = Recombinant Sequence
MFVFLVLLPLVSSQCVNLRTRTQLPPAYTNSFTRGVYYPDKVFRSSVLHSTQDLFLPFFSNVTWFHAIHVSGTNGTKRFDNPVLPFNDGVYFASTEKSNIIRGWIFGTTLDSKTQSLLIVNNATNVVIKVCEFQFCNDPFLDVYYHKNNKSWMESGVYSSANNCTFEYVSQPFLMDLEGKQGNFKNLREFVFKNIDGYFKIYSKHTPINLVRDLPQGFSALEPLVDLPIGINITRFQTLLALHRSYLTPGDSSSGWTAGAAAYYVGYLQPRTFLLKYNENGTITDAVDCALDPLSETKCTLKSFTVEKGIYQTSNFRVQPTESIVRFPNITNLCPFGEVFNATRFASVYAWNRKRISNCVADYSVLYNSASFSTFKCYGVSPTKLNDLCFTNVYADSFVIRGDEVRQIAPGQTGKIADYNYKLPDDFTGCVIAWNSNNLDSKVGGNYNYRYRLFRKSNLKPFERDISTEIYQAGSKPCNGVEGFNCYFPLQSYGFQPTNGVGYQPYRVVVLSFELLHAPATVCGPKKSTNLVKNKCVNFNFNGLTGTGVLTESNKKFLPFQQFGRDIADTTDAVRDPQTLEILDITPCSFGGVSVITPGTNTSNQVAVLYQGVNCTEVPVAIHADQLTPTWRVYSTGSNVFQTRAGCLIGAEHVNNSYECDIPIGAGICASYQTQTNSRGSASSVASQSIIAYTMSLGAENSVAYSNNSIAIPTNFTISVTTEILPVSMTKTSVDCTMYICGDSTECSNLLLQYGSFCTQLNRALTGIAVEQDKNTQEVFAQVKQIYKTPPIKDFGGFNFSQILPDPSKPSKRSPIEDLLFNKVTLADAGFIKQYGDCLGDIAARDLICAQKFNGLTVLPPLLTDEMIAQYTSALLAGTITSGWTFGAGPALQIPFPMQMAYRFNGIGVTQNVLYENQKLIANQFNSAIGKIQDSLSSTPSALGKLQNVVNQNAQALNTLVKQLSSNFGAISSVLNDILSRLDPPEAEVQIDRLITGRLQSLQTYVTQQLIRAAEIRASANLAATKMSECVLGQSKRVDFCGKGYHLMSFPQSAPHGVVFLHVTYVPAQEKNFTTAPAICHDGKAHFPREGVFVSNGTHWFVTQRNFYEPQIITTDNTFVSGNCDVVIGIVNNTVYDPLQPELDSFKEELDKYFKNHTSPDVDLGDISGINASVVNIQKEIDRLNEVAKNLNESLIDLQELGKYGSGSGSGSGSGSGSGSGSGSGSGSGSGSGSGSMENTTSGFLGPLLVLQAGFFLLTRILTIPQSLDSWWTSLNFLGGAPTCPGQNSRSPTSNHSPTSCPPICPGYRWMCLRRFIIFLFILLLCLIFLLVLLDYQGMLPVCPLLPGTSTTSTGPCKTCTNPANGTSMFPSCCCTKPSDGNCTCIPIPSSWAFARFLWEWASVRFSWLSFLVPFVQWFVGLSPTVWLSVMWMMWYWGPSLYNILSPFLPLLPIFFCLWVYI

SEQ ID NO: 110 - protein, 1462 aa, synthetic construct
  REGION 1..1462: note = Recombinant Sequence
MFVFLVLLPLVSSQCVNLRTRTQLPPAYTNSFTRGVYYPDKVFRSSVLHSTQDLFLPFFSNVTWFHAIHFSGTNGTKRFDNPVLPFNDGVYFASIEKSNIIRGWIFGTTLDSKTQSLLIVNNATNVVIKVCEFQFCNDPFLDVYYHKNNKSWMESGVYSSANNCTFEYVSQPFLMDLEGKQGNFKNLREFVFKNIDGYFKIYSKHTPINLVRDLPQGFSVLEPLVDLPIGINITRFQTLLALHRSYLTPGDSSSGLTAGAAAYYVGYLQPRTFLLKYNENGTITDAVDCALDPLSETKCTLKSFTVEKGIYQTSNFRVQPTESIVRFPNITNLCPFGEVFNATRFASVYAWNRKRISNCVADYSVLYNSASFSTFKCYGVSPTKLNDLCFTNVYADSFVIRGDEVRQIAPGQTGNIADYNYKLPDDFTGCVIAWNSNNLDSKVGGNYNYRYRLFRKSNLKPFERDISTEIYQAGSKPCNGVEGFNCYFPLQSYGFQPTNGVGYQPYRVVVLSFELLHAPATVCGPKKSTNLVKNKCVNFNFNGLTGTGVLTESNKKFLPFQQFGRDIADTTDAVRDPQTLEILDITPCSFGGVSVITPGTNTSNQVAVLYQGVNCTEVPVAIHADQLTPTWRVYSTGSNVFQTRAGCLIGAEHVNNSYECDIPIGAGICASYQTQTNSRGSASSVASQSIIAYTMSLGAENSVAYSNNSIAIPTNFTISVTTEILPVSMTKTSVDCTMYICGDSTECSNLLLQYGSFCTQLNRALTGIAVEQDKNTQEVFAQVKQIYKTPPIKDFGGFNFSQILPDPSKPSKRSPIEDLLFNKVTLADAGFIKQYGDCLGDIAARDLICAQKFNGLTVLPPLLTDEMIAQYTSALLAGTITSGWTFGAGPALQIPFPMQMAYRFNGIGVTQNVLYENQKLIANQFNSAIGKIQDSLSSTPSALGKLQNVVNQNAQALNTLVKQLSSNFGAISSVLNDILSRLDPPEAEVQIDRLITGRLQSLQTYVTQQLIRAAEIRASANLAATKMSECVLGQSKRVDFCGKGYHLMSFPQSAPHGVVFLHVTYVPAQEKNFTTAPAICHDGKAHFPREGVFVSNGTHWFVTQRNFYEPQIITTDNTFVSGNCDVVIGIVNNTVYDPLQPELDSFKEELDKYFKNHTSPDVDLGDISGINASVVNIQKEIDRLNEVAKNLNESLIDLQELGKYGSGSGSGSGSGSGSGSGSGSGSGSGSGSGSGSMENTTSGFLGPLLVLQAGFFLLTRILTIPQSLDSWWTSLNFLGGAPTCPGQNSRSPTSNHSPTSCPPICPGYRWMCLRRFIIFLFILLLCLIFLLVLLDYQGMLPVCPLLPGTSTTSTGPCKTCTNPANGTSMFPSCCCTKPSDGNCTCIPIPSSWAFARFLWEWASVRFSWLSFLVPFVQWFVGLSPTVWLSVMWMMWYWGPSLYNILSPFLPLLPIFFCLWVYI

SEQ ID NO: 111 - protein, 1461 aa, synthetic construct
  REGION 1..1461: note = Recombinant Sequence
MFVFLVLLPLVSSQCVNLTTRTQLPPAYTNSFTRGVYYPDKVFRSSVLHSTQDLFLPFFSNVTWFHAISGTNGTKRFDNPVLPFNDGVYFASTEKSNIIRGWIFGTTLDSKTQSLLIVNNATNVVIKVCEFQFCNDPFLGVYHKNNKSWMESEFRVYSSANNCTFEYVSQPFLMDLEGKQGNFKNLREFVFKNIDGYFKIYSKHTPINLVRDLPQGFSALEPLVDLPIGINITRFQTLLALHRSYLTPGDSSSGWTAGAAAYYVGYLQPRTFLLKYNENGTITDAVDCALDPLSETKCTLKSFTVEKGIYQTSNFRVQPTESIVRFPNITNLCPFGEVFNATRFASVYAWNRKRISNCVADYSVLYNSASFSTFKCYGVSPTKLNDLCFTNVYADSFVIRGDEVRQIAPGQTGKIADYNYKLPDDFTGCVIAWNSNNLDSKVGGNYNYLYRLFRKSNLKPFERDISTEIYQAGSTPCNGVEGFNCYFPLQSYGFQPTYGVGYQPYRVVVLSFELLHAPATVCGPKKSTNLVKNKCVNFNFNGLTGTGVLTESNKKFLPFQQFGRDIDDTTDAVRDPQTLEILDITPCSFGGVSVITPGTNTSNQVAVLYQGVNCTEVPVAIHADQLTPTWRVYSTGSNVFQTRAGCLIGAEHVNNSYECDIPIGAGICASYQTQTNSHGSASSVASQSIIAYTMSLGAENSVAYSNNSIAIPINFTISVTTEILPVSMTKTSVDCTMYICGDSTECSNLLLQYGSFCTQLNRALTGIAVEQDKNTQEVFAQVKQIYKTPPIKDFGGFNFSQILPDPSKPSKRSPIEDLLFNKVTLADAGFIKQYGDCLGDIAARDLICAQKFNGLTVLPPLLTDEMIAQYTSALLAGTITSGWTFGAGPALQIPFPMQMAYRFNGIGVTQNVLYENQKLIANQFNSAIGKIQDSLSSTPSALGKLQDVVNQNAQALNTLVKQLSSNFGAISSVLNDILARLDPPEAEVQIDRLITGRLQSLQTYVTQQLIRAAEIRASANLAATKMSECVLGQSKRVDFCGKGYHLMSFPQSAPHGVVFLHVTYVPAQEKNFTTAPAICHDGKAHFPREGVFVSNGTHWFVTQRNFYEPQIITTHNTFVSGNCDVVIGIVNNTVYDPLQPELDSFKEELDKYFKNHTSPDVDLGDISGINASVVNIQKEIDRLNEVAKNLNESLIDLQELGKYGSGSGSGSGSGSGSGSGSGSGSGSGSGSGSGSMENTTSGFLGPLLVLQAGFFLLTRILTIPQSLDSWWTSLNFLGGAPTCPGQNSRSPTSNHSPTSCPPICPGYRWMCLRRFIIFLFILLLCLIFLLVLLDYQGMLPVCPLLPGTSTTSTGPCKTCTNPANGTSMFPSCCCTKPSDGNCTCIPIPSSWAFARFLWEWASVRFSWLSFLVPFVQWFVGLSPTVWLSVMWMMWYWGPSLYNILSPFLPLLPIFFCLWVYI

SEQ ID NO: 112 - protein, 1461 aa, synthetic construct
  REGION 1..1461: note = Recombinant Sequence
MFVFLVLLPLVSSQCVNLTTRTQLPPAYTNSFTRGVYYPDKVFRSSVLHSTQDLFLPFFSNVTWFHAISGTNGTKRFDNPVLPFNDGVYFASTEKSNIIRGWIFGTTLDSKTQSLLIVNNATNVVIKVCEFQFCNDPFLGVYHKNNKSWMESEFRVYSSANNCTFEYVSQPFLMDLEGKQGNFKNLREFVFKNIDGYFKIYSKHTPINLVRDLPQGFSALEPLVDLPIGINITRFQTLLALHRSYLTPGDSSSGWTAGAAAYYVGYLQPRTFLLKYNENGTITDAVDCALDPLSETKCTLKSFTVEKGIYQTSNFRVQPTESIVRFPNITNLCPFGEVFNATRFASVYAWNRKRISNCVADYSVLYNSASFSTFKCYGVSPTKLNDLCFTNVYADSFVIRGDEVRQIAPGQTGKIADYNYKLPDDFTGCVIAWNSNNLDSKVGGNYNYLYRLFRKSNLKPFERDISTEIYQAGSTPCNGVKGFNCYFPLQPYGFQPTYGVGYQPYRVVVLSFELLHAPATVCGPKKSTNLVKNKCVNFNFNGLTGTGVLTESNKKFLPFQQFGRDIDDTTDAVRDPQTLEILDITPCSFGGVSVITPGTNTSNQVAVLYQGVNCTEVPVAIHADQLTPTWRVYSTGSNVFQTRAGCLIGAEHVNNSYECDIPIGAGICASYQTQTNSHGSASSVASQSIIAYTMSLGAENSVAYSNNSIAIPINFTISVTTEILPVSMTKTSVDCTMYICGDSTECSNLLLQYGSFCTQLNRALTGIAVEQDKNTQEVFAQVKQIYKTPPIKDFGGFNFSQILPDPSKPSKRSPIEDLLFNKVTLADAGFIKQYGDCLGDIAARDLICAQKFNGLTVLPPLLTDEMIAQYTSALLAGTITSGWTFGAGPALQIPFPMQMAYRFNGIGVTQNVLYENQKLIANQFNSAIGKIQDSLSSTPSALGKLQDVVNQNAQALNTLVKQLSSNFGAISSVLNDILARLDPPEAEVQIDRLITGRLQSLQTYVTQQLIRAAEIRASANLAATKMSECVLGQSKRVDFCGKGYHLMSFPQSAPHGVVFLHVTYVPAQEKNFTTAPAICHDGKAHFPREGVFVSNGTHWFVTQRNFYEPQIITTHNTFVSGNCDVVIGIVNNTVYDPLQPELDSFKEELDKYFKNHTSPDVDLGDISGINASVVNIQKEIDRLNEVANNLNESLIDLQELGKYGSGSGSGSGSGSGSGSGSGSGSGSGSGSGSGSMENTTSGFLGPLLVLQAGFFLLTRILTIPQSLDSWWTSLNFLGGAPTCPGQNSRSPTSNHSPTSCPPICPGYRWMCLRRFIIFLFILLLCLIFLLVLLDYQGMLPVCPLLPGTSTTSTGPCKTCTNPANGTSMFPSCCCTKPSDGNCTCIPIPSSWAFARFLWEWASVRFSWLSFLVPFVQWFVGLSPTVWLSVMWMMWYWGPSLYNILSPFLPLLPIFFCLWVYI

SEQ ID NO: 113 - protein, 1461 aa, synthetic construct
  REGION 1..1461: note = Recombinant Sequence
MFVFLVLLPLVSSQCVNFTTRTQLPPAYTNSFTRGVYYPDKVFRSSVLHSTQDLFLPFFSNVTWFHAIHVSGTNGTKRFANPVLPFNDGVYFASTEKSNIIRGWIFGTTLDSKTQSLLIVNNATNVVIKVCEFQFCNDPFLGVYYHKNNKSWMESEFRVYSSANNCTFEYVSQPFLMDLEGKQGNFKNLREFVFKNIDGYFKIYSKHTPINLVRGLPQGFSALEPLVDLPIGINITRFQTLHRSYLTPGDSSSGWTAGAAAYYVGYLQPRTFLLKYNENGTITDAVDCALDPLSETKCTLKSFTVEKGIYQTSNFRVQPTESIVRFPNITNLCPFGEVFNATRFASVYAWNRKRISNCVADYSVLYNSASFSTFKCYGVSPTKLNDLCFTNVYADSFVIRGDEVRQIAPGQTGNIADYNYKLPDDFTGCVIAWNSNNLDSKVGGNYNYLYRLFRKSNLKPFERDISTEIYQAGSTPCNGVKGFNCYFPLQSYGFQPTYGVGYQPYRVVVLSFELLHAPATVCGPKKSTNLVKNKCVNFNFNGLTGTGVLTESNKKFLPFQQFGRDIADTTDAVRDPQTLEILDITPCSFGGVSVITPGTNTSNQVAVLYQGVNCTEVPVAIHADQLTPTWRVYSTGSNVFQTRAGCLIGAEHVNNSYECDIPIGAGICASYQTQTNSPGSASSVASQSIIAYTMSLGVENSVAYSNNSIAIPTNFTISVTTEILPVSMTKTSVDCTMYICGDSTECSNLLLQYGSFCTQLNRALTGIAVEQDKNTQEVFAQVKQIYKTPPIKDFGGFNFSQILPDPSKPSKRSPIEDLLFNKVTLADAGFIKQYGDCLGDIAARDLICAQKFNGLTVLPPLLTDEMIAQYTSALLAGTITSGWTFGAGPALQIPFPMQMAYRFNGIGVTQNVLYENQKLIANQFNSAIGKIQDSLSSTPSALGKLQDVVNQNAQALNTLVKQLSSNFGAISSVLNDILSRLDPPEAEVQIDRLITGRLQSLQTYVTQQLIRAAEIRASANLAATKMSECVLGQSKRVDFCGKGYHLMSFPQSAPHGVVFLHVTYVPAQEKNFTTAPAICHDGKAHFPREGVFVSNGTHWFVTQRNFYEPQIITTDNTFVSGNCDVVIGIVNNTVYDPLQPELDSFKEELDKYFKNHTSPDVDLGDISGINASVVNIQKEIDRLNEVAKNLNESLIDLQELGKYGSGSGSGSGSGSGSGSGSGSGSGSGSGSGSGSMENTTSGFLGPLLVLQAGFFLLTRILTIPQSLDSWWTSLNFLGGAPTCPGQNSRSPTSNHSPTSCPPICPGYRWMCLRRFIIFLFILLLCLIFLLVLLDYQGMLPVCPLLPGTSTTSTGPCKTCTNPANGTSMFPSCCCTKPSDGNCTCIPIPSSWAFARFLWEWASVRFSWLSFLVPFVQWFVGLSPTVWLSVMWMMWYWGPSLYNILSPFLPLLPIFFCLWVYI

SEQ ID NO: 114 - protein, 1464 aa, synthetic construct
  REGION 1..1464: note = Recombinant Sequence
MFVFLVLLPLVSSQCVNFTNRTQLPSAYTNSFTRGVYYPDKVFRSSVLHSTQDLFLPFFSNVTWFHAIHVSGTNGTKRFDNPVLPFNDGVYFASTEKSNIIRGWIFGTTLDSKTQSLLIVNNATNVVIKVCEFQFCNYPFLGVYYHKNNKSWMESEFRVYSSANNCTFEYVSQPFLMDLEGKQGNFKNLSEFVFKNIDGYFKIYSKHTPINLVRDLPQGFSALEPLVDLPIGINITRFQTLLALHRSYLTPGDSSSGWTAGAAAYYVGYLQPRTFLLKYNENGTITDAVDCALDPLSETKCTLKSFTVEKGIYQTSNFRVQPTESIVRFPNITNLCPFGEVFNATRFASVYAWNRKRISNCVADYSVLYNSASFSTFKCYGVSPTKLNDLCFTNVYADSFVIRGDEVRQIAPGQTGTIADYNYKLPDDFTGCVIAWNSNNLDSKVGGNYNYLYRLFRKSNLKPFERDISTEIYQAGSTPCNGVKGFNCYFPLQSYGFQPTYGVGYQPYRVVVLSFELLHAPATVCGPKKSTNLVKNKCVNFNFNGLTGTGVLTESNKKFLPFQQFGRDIADTTDAVRDPQTLEILDITPCSFGGVSVITPGTNTSNQVAVLYQGVNCTEVPVAIHADQLTPTWRVYSTGSNVFQTRAGCLIGAEYVNNSYECDIPIGAGICASYQTQTNSPGSASSVASQSIIAYTMSLGAENSVAYSNNSIAIPTNFTISVTTEILPVSMTKTSVDCTMYICGDSTECSNLLLQYGSFCTQLNRALTGIAVEQDKNTQEVFAQVKQIYKTPPIKDFGGFNFSQILPDPSKPSKRSPIEDLLFNKVTLADAGFIKQYGDCLGDIAARDLICAQKFNGLTVLPPLLTDEMIAQYTSALLAGTITSGWTFGAGPALQIPFPMQMAYRFNGIGVTQNVLYENQKLIANQFNSAIGKIQDSLSSTPSALGKLQDVVNQNAQALNTLVKQLSSNFGAISSVLNDILSRLDPPEAEVQIDRLITGRLQSLQTYVTQQLIRAAEIRASANLAAIKMSECVLGQSKRVDFCGKGYHLMSFPQSAPHGVVFLHVTYVPAQEKNFTTAPAICHDGKAHFPREGVFVSNGTHWFVTQRNFYEPQIITTDNTFVSGNCDVVIGIVNNTVYDPLQPELDSFKEELDKYFKNHTSPDVDLGDISGINASFVNIQKEIDRLNEVAKNLNESLIDLQELGKYGSGSGSGSGSGSGSGSGSGSGSGSGSGSGSGSMENTTSGFLGPLLVLQAGFFLLTRILTIPQSLDSWWTSLNFLGGAPTCPGQNSRSPTSNHSPTSCPPICPGYRWMCLRRFIIFLFILLLCLIFLLVLLDYQGMLPVCPLLPGTSTTSTGPCKTCTNPANGTSMFPSCCCTKPSDGNCTCIPIPSSWAFARFLWEWASVRFSWLSFLVPFVQWFVGLSPTVWLSVMWMMWYWGPSLYNILSPFLPLLPIFFCLWVYI

SEQ ID NO: 115 - protein, 1464 aa, synthetic construct
  REGION 1..1464: note = Recombinant Sequence
MFVFLVLLPLVSSQCVNLTTRTQLPPAYTNSFTRGVYYPDKVFRSSVLHSTQDLFLPFFSNVTWFHAIHVSGTNGTKRFDNPVLPFNDGVYFASIEKSNIIRGWIFGTTLDSKTQSLLIVNNATNVVIKVCEFQFCNDPFLDVYYHKNNKSWMKSEFRVYSSANNCTFEYVSQPFLMDLEGKQGNFKNLREFVFKNIDGYFKIYSKHTPINLVRDLPQGFSALEPLVDLPIGINITRFQTLLALHRSYLTPGDSSSGWTAGAAAYYVGYLQPRTFLLKYNENGTITDAVDCALDPLSETKCTLKSFTVEKGIYQTSNFRVQPTESIVRFPNITNLCPFGEVFNATRFASVYAWNRKRISNCVADYSVLYNSASFSTFKCYGVSPTKLNDLCFTNVYADSFVIRGDEVRQIAPGQTGKIADYNYKLPDDFTGCVIAWNSNNLDSKVGGNYNYRYRLFRKSNLKPFERDISTEIYQAGSTPCNGVQGFNCYFPLQSYGFQPTNGVGYQPYRVVVLSFELLHAPATVCGPKKSTNLVKNKCVNFNFNGLTGTGVLTESNKKFLPFQQFGRDIADTTDAVRDPQTLEILDITPCSFGGVSVITPGTNTSNQVAVLYQGVNCTEVPVAIHADQLTPTWRVYSTGSNVFQTRAGCLIGAEHVNNSYECDIPIGAGICASYQTQTNSRGSASSVASQSIIAYTMSLGAENSVAYSNNSIAIPTNFTISVTTEILPVSMTKTSVDCTMYICGDSTECSNLLLQYGSFCTQLNRALTGIAVEQDKNTQEVFAQVKQIYKTPPIKDFGGFNFSQILPDPSKPSKRSPIEDLLFNKVTLADAGFIKQYGDCLGDIAARDLICAQKFNGLTVLPPLLTDEMIAQYTSALLAGTITSGWTFGAGPALQIPFPMQMAYRFNGIGVTQNVLYENQKLIANQFNSAIGKIQDSLSSTPSALGKLQDVVNQNAQALNTLVKQLSSNFGAISSVLNDILSRLDPPEAEVQIDRLITGRLQSLQTYVTQQLIRAAEIRASANLAATKMSECVLGQSKRVDFCGKGYHLMSFPQSAPHGVVFLHVTYVPAHEKNFTTAPAICHDGKAHFPREGVFVSNGTHWFVTQRNFYEPQIITTDNTFVSGNCDVVIGIVNNTVYDPLQPELDSFKEELDKYFKNHTSPDVDLGDISGINASVVNIQKEIDRLNEVAKNLNESLIDLQELGKYGSGSGSGSGSGSGSGSGSGSGSGSGSGSGSGSMENTTSGFLGPLLVLQAGFFLLTRILTIPQSLDSWWTSLNFLGGAPTCPGQNSRSPTSNHSPTSCPPICPGYRWMCLRRFIIFLFILLLCLIFLLVLLDYQGMLPVCPLLPGTSTTSTGPCKTCTNPANGTSMFPSCCCTKPSDGNCTCIPIPSSWAFARFLWEWASVRFSWLSFLVPFVQWFVGLSPTVWLSVMWMMWYWGPSLYNILSPFLPLLPIFFCLWVYI

SEQ ID NO: 116 - protein, 1457 aa, synthetic construct
  REGION 1..1457: note = Recombinant Sequence
MFVFLVLLPLVSSQCVNLTTRTQLPPAYTNSFTRGVYYPDKVFRSSVLHSTQDLFLPFFSNVTWFHAIHVSGTNVIKRFDNPVLPFNDGVYFASTEKSNIIRGWIFGTTLDSKTQSLLIVNNATNVVIKVCEFQFCNDPFLGVYYHKNNKSWMESEFRVYSSANNCTFEYVSQPFLMDLEGKQGNFKNLREFVFKNIDGYFKIYSKHTPINLVRDLPQGFSALEPLVDLPIGINITRFQTLLALHNSSSGWTAGAAAYYVGYLQPRTFLLKYNENGTITDAVDCALDPLSETKCTLKSFTVEKGIYQTSNFRVQPTESIVRFPNITNLCPFGEVFNATRFASVYAWNRKRISNCVADYSVLYNSASFSTFKCYGVSPTKLNDLCFTNVYADSFVIRGDEVRQIAPGQTGKIADYNYKLPDDFTGCVIAWNSNNLDSKVGGNYNYQYRLFRKSNLKPFERDISTEIYQAGSTPCNGVEGFNCYSPLQSYGFQPTNGVGYQPYRVVVLSFELLHAPATVCGPKKSTNLVKNKCVNFNFNGLTGTGVLTESNKKFLPFQQFGRDIADTTDAVRDPQTLEILDITPCSFGGVSVITPGTNTSNQVAVLYQGVNCTEVPVAIHADQLTPTWRVYSTGSNVFQTRAGCLIGAEHVNNSYECDIPIGAGICASYQTQTNSPGSASSVASQSIIAYTMSLGAENSVAYSNNSIAIPTNFTISVTTEILPVSMTKTSVDCTMYICGDSTECSNLLLQYGSFCTQLNRALTGIAVEQDKNTQEVFAQVKQIYKTPPIKDFGGFNFSQILPDPSKPSKRSPIEDLLFNKVTLADAGFIKQYGDCLGDIAARDLICAQKFNGLNVLPPLLTDEMIAQYTSALLAGTITSGWTFGAGPALQIPFPMQMAYRFNGIGVTQNVLYENQKLIANQFNSAIGKIQDSLSSTPSALGKLQDVVNQNAQALNTLVKQLSSNFGAISSVLNDILSRLDPPEAEVQIDRLITGRLQSLQTYVTQQLIRAAEIRASANLAATKMSECVLGQSKRVDFCGKGYHLMSFPQSAPHGVVFLHVTYVPAQEKNFTTAPAICHDGKAHFPREGVFVSNGTHWFVTQRNFYEPQIITTDNTFVSGNCDVVIGIVNNTVYDPLQPELDSFKEELDKYFKNHTSPDVDLGDISGINASVVNIQKEIDRLNEVAKNLNESLIDLQELGKYGSGSGSGSGSGSGSGSGSGSGSGSGSGSGSGSMENTTSGFLGPLLVLQAGFFLLTRILTIPQSLDSWWTSLNFLGGAPTCPGQNSRSPTSNHSPTSCPPICPGYRWMCLRRFIIFLFILLLCLIFLLVLLDYQGMLPVCPLLPGTSTTSTGPCKTCTNPANGTSMFPSCCCTKPSDGNCTCIPIPSSWAFARFLWEWASVRFSWLSFLVPFVQWFVGLSPTVWLSVMWMMWYWGPSLYNILSPFLPLLPIFFCLWVYI

SEQ ID NO: 117 - protein, 1456 aa, synthetic construct
  REGION 1..1456: note = Recombinant Sequence
MFVFLVLLPLVSSQCVNLTTRTQLPPAYTNSFTRGVYYPDKVFRSSVLHSTQDLFLPFFSNVTWFHAIHVSGTNVIKRFDNPVLPFNDGVYFASTEKSNIIRGWIFGTTLDSKTQSLLIVNNATNVVIKVCEFQFCNDPFLGVYYHKNNKSWMESEFRVYSSANNCTFEYVSQPFLMDLEGKQGNFKNLREFVFKNIDGYFKIYSKHTPINLVRDLPQGFSALEPLVDLPIGINITRFQTLLALHSSSGWTAGAAAYYVGYLQPRTFLLKYNENGTITDAVDCALDPLSETKCTLKSFTVEKGIYQTSNFRVQPTESIVRFPNITNLCPFGEVFNATRFASVYAWNRKRISNCVADYSVLYNSASFSTFKCYGVSPTKLNDLCFTNVYADSFVIRGDEVRQIAPGQTGKIADYNYKLPDDFTGCVIAWNSNNLDSKVGGNYNYQYRLFRKSNLKPFERDISTEIYQAGSTPCNGVEGFNCYSPLQSYGFQPTNGVGYQPYRVVVLSFELLHAPATVCGPKKSTNLVKNKCVNFNFNGLTGTGVLTESNKKFLPFQQFGRDIADTTDAVRDPQTLEILDITPCSFGGVSVITPGTNTSNQVAVLYQGVNCTEVPVAIHADQLTPTWRVYSTGSNVFQTRAGCLIGAEHVNNSYECDIPIGAGICASYQTQTNSPGSASSVASQSIIAYTMSLGAENSVAYSNNSIAIPTNFTISVTTEILPVSMTKTSVDCTMYICGDSTECSNLLLQYGSFCTQLNRALTGIAVEQDKNTQEVFAQVKQIYKTPPIKDFGGFNFSQILPDPSKPSKRSPIEDLLFNKVTLADAGFIKQYGDCLGDIAARDLICAQKFNGLNVLPPLLTDEMIAQYTSALLAGTITSGWTFGAGPALQIPFPMQMAYRFNGIGVTQNVLYENQKLIANQFNSAIGKIQDSLSSTPSALGKLQDVVNQNAQALNTLVKQLSSNFGAISSVLNDILSRLDPPEAEVQIDRLITGRLQSLQTYVTQQLIRAAEIRASANLAATKMSECVLGQSKRVDFCGKGYHLMSFPQSAPHGVVFLHVTYVPAQEKNFTTAPAICHDGKAHFPREGVFVSNGTHWFVTQRNFYEPQIITTDNTFVSGNCDVVIGIVNNTVYDPLQPELDSFKEELDKYFKNHTSPDVDLGDISGINASVVNIQKEIDRLNEVAKNLNESLIDLQELGKYGSGSGSGSGSGSGSGSGSGSGSGSGSGSGSGSMENTTSGFLGPLLVLQAGFFLLTRILTIPQSLDSWWTSLNFLGGAPTCPGQNSRSPTSNHSPTSCPPICPGYRWMCLRRFIIFLFILLLCLIFLLVLLDYQGMLPVCPLLPGTSTTSTGPCKTCTNPANGTSMFPSCCCTKPSDGNCTCIPIPSSWAFARFLWEWASVRFSWLSFLVPFVQWFVGLSPTVWLSVMWMMWYWGPSLYNILSPFLPLLPIFFCLWVYI

SEQ ID NO: 118 - protein, 1464 aa, synthetic construct
  REGION 1..1464: note = Recombinant Sequence
MFVFLVLLPLVSSQCVNLTTRTQLPPAYTNSFTRGVYYPDKVFRSSVLHSTQDLFLPFFSNVTWFHAIHVSGTNGTKRFDNPVLPFNDGVYFASTEKSNIIRGWIFGTTLDSKTQSLLIVNNATNVVIKVCEFQFCNDPFLGVYYHKNNKSLMESEFRVYSSANNCTFEYVSQPFLMDLEGKQGNFKNLREFVFKNIDGYFKIYSKHTPINLVRDLPQGFSALEPLVDLPIGINITRFQTLLALHRSYLTPGDSSSGWTAGAAAYYVGYLQPRTFLLKYNENGTITDAVDCALDPLSETKCTLKSFTVEKGIYQTSNFRVQPTESIVRFPNITNLCPFGEVFNATRFASVYAWNRKRISNCVADYSVLYNSASFSTFKCYGVSPTKLNDLCFTNVYADSFVIRGDEVRQIAPGQTGKIADYNYKLPDDFTGCVIAWNSNNLDSKVGGNYNYLYRLFRKSNLKPFERDISTEIYQAGSTPCNGVKGFNCYFPLQSYGFQPTNGVGYQPYRVVVLSFELLHAPATVCGPKKSTNLVKNKCVNFNFNGLTGTGVLTESNKKFLPFQQFGRDIADTTDAVRDPQTLEILDITPCSFGGVSVITPGTNTSNQVAVLYQGVNCTEVPVAIHADQLTPTWRVYSTGSNVFQTRAGCLIGAEHVNNSYECDIPIGAGICASYQTQTNSPGSASSVASQSIIAYTMSLGAENSVAYSNNSIAIPTNFTISVTTEILPVSMTKTSVDCTMYICGDSTECSNLLLQYGSFCTQLNRALTVIAVEQDKNTQEVFAQVKQIYKTPPIKDFGGFNFSQILPDPSKPSKRSPIEDLLFNKVTLADAGFIKQYGDCLGDIAARDLICAQKFNGLTVLPPLLTDEMIAQYTSALLAGTITSGWTFGAGPALQIPFPMQMAYRFNGIGVTQNVLYENQKLIANQFNSAIGKIQDSLSSTPSALGKLQDVVNQNAQALNTLVKQLSSNFGAISSVLNDILSRLDPPEAEVQIDRLITGRLQSLQTYVTQQLIRAAEIRASANLAATKMSECVLGQSKRVDFCGKGYHLMSFPQSAPHGVVFLHVTYVPAQEKNFTTAPAICHDGKAHFPREGVFVSNGTHWFVTQRNFYEPQIITTDNTFVSGNCDVVIGIVNNTVYDPLQPELDSFKEELDKYFKNHTSPDVDLGDISGINASVVNIQKEIDRLNEVAKNLNESLIDLQELGKYGSGSGSGSGSGSGSGSGSGSGSGSGSGSGSGSMENTTSGFLGPLLVLQAGFFLLTRILTIPQSLDSWWTSLNFLGGAPTCPGQNSRSPTSNHSPTSCPPICPGYRWMCLRRFIIFLFILLLCLIFLLVLLDYQGMLPVCPLLPGTSTTSTGPCKTCTNPANGTSMFPSCCCTKPSDGNCTCIPIPSSWAFARFLWEWASVRFSWLSFLVPFVQWFVGLSPTVWLSVMWMMWYWGPSLYNILSPFLPLLPIFFCLWVYI

SEQ ID NO: 119 - protein, 1464 aa, synthetic construct
  REGION 1..1464: note = Recombinant Sequence
MFVFLVLLPLVSSQCVNLTTRTQLPPAYTNSFTRGVYYPDKVFRSSVLHSTQDLFLPFFSNVTWFHAIHVSGTNGTKRFDNPVLPFNDGVYFASTEKSNIIRGWIFGTTLDSKTQSLLIVNNATNVVIKVCEFQFCNDPFLGVYYHKNNKSWMESEFRVYSSANNCTFEYVSQPFLMDLEGKQGNFKNLREFVFKNIDGYFKIYSKHTPINLVRDLPQGFSALEPLVDLPIGINITRFQTLLALHRSYLTPGDSSSGWTAGAAAYYVGYLQPRTFLLKYNENGTITDAVDCALDPLSETKCTLKSFTVEKGIYQTSNFRVQPTESIVRFPNITNLCPFGEVFNATRFASVYAWNRKRISNCVADYSVLYNSASFSTFKCYGVSPTKLNDLCFTNVYADSFVIRGDEVRQIAPGQTGKIADYNYKLPDDFTGCVIAWNSNNLDSKVGGNYNYLYRLFRKSNLKPFERDISTEIYQAGSKPCNGVEGFNCYFPLQSYGFQPTNGVGYQPYRVVVLSFELLHAPATVCGPKKSTNLVKNKCVNFNFNGLTGTGVLTESNKKFLPFQQFGRDIADTTDAVRDPQTLEILDITPCSFGGVSVITPGTNTSNQVAVLYQGVNCTEVPVAIHADQLTPTWRVYSTGSNVFQTRAGCLIGAEHVNNSYECDIPIGAGICASYQTQTNSHGSASSVASQSIIAYTMSLGAENSVAYSNNSIAIPTNFTISVTTEILPVSMAKTSVDCTMYICGDSTECSNLLLQYGSFCTQLNRALTGIAVEQDKNTQEVFAQVKQIYKTPPIKDFGGFNFSQILPDPSKPSKRSPIEDLLFNKVTLADAGFIKQYGDCLGDIAARDLICAQKFNGLTVLPPLLTDEMIAQYTSALLAGTITSGWTFGAGPALQIPFPMQMAYRFNGIGVTQNVLYENQKLIANQFNSAIGKIQDSLSSTPSALGKLQDVVNQNAQALNTLVKQLSSNFGAISSVLNDILSRLDPPEAEVQIDRLITGRLQSLQTYVTQQLIRAAEIRASANLAATKMSECVLGQSKRVDFCGKGYHLMSFPQSAPHGVVFLHVTYVPAQEKNFTTAPAICHDGKAHFPREGVFVSNGTHWFVTQRNFYEPQIITTDNTFVSGNCDVVIGIVNNTVYDPLQPELDSFKEELDKYFKNHTSPDVDLGDISGINASVVNIQKEIDRLNEVAKNLNESLIDLQELGKYGSGSGSGSGSGSGSGSGSGSGSGSGSGSGSGSMENTTSGFLGPLLVLQAGFFLLTRILTIPQSLDSWWTSLNFLGGAPTCPGQNSRSPTSNHSPTSCPPICPGYRWMCLRRFIIFLFILLLCLIFLLVLLDYQGMLPVCPLLPGTSTTSTGPCKTCTNPANGTSMFPSCCCTKPSDGNCTCIPIPSSWAFARFLWEWASVRFSWLSFLVPFVQWFVGLSPTVWLSVMWMMWYWGPSLYNILSPFLPLLPIFFCLWVYI

SEQ ID NO: 120 - protein, 1461 aa, synthetic construct
  REGION 1..1461: note = Recombinant Sequence
MFVFLVLLPLVSSQCVNLTTRTQLPPAYTNSFTRGVYYPDKVFRSSVLHSTRDLFLPFFSNVTWFHVISGTNGTKRFDNPVLPFNDGVYFASTEKSNIIRGWIFGTTLDSKTQSLLIVNNATNVVIKVCEFQFCNDPFLGVYHKNNKSWMESEFRVYSSANNCTFEYVSQPFLMDLEGKQGNFKNLREFVFKNIDGYFKIYSKHTPINLVRDLPQGFSALEPLVDLPIGINITRFQTLLALHRSYLTPGDSSSGWTAGAAAYYVGYLQPRTFLLKYNENGTITDAVDCALDPLSETKCTLKSFTVEKGIYQTSNFRVQPTESIVRFPNITNLCPFGEVFNATRFASVYAWNRKRISNCVADYSVLYNSASFSTFKCYGVSPTKLNDLCFTNVYADSFVIRGDEVRQIAPGQTGKIADYNYKLPDDFTGCVIAWNSNNLDSKVGGNYNYLYRLFRKSNLKPFERDISTEIYQAGSTPCNGVKGFNCYFPLQSYGFQPTNGVGYQPYRVVVLSFELLHAPATVCGPKKSTNLVKNKCVNFNFNGLTGTGVLTESNKKFLPFQQFGRDIADTTDAVRDPQTLEILDITPCSFGGVSVITPGTNTSNQVAVLYQGVNCTEVPVAIHADQLTPTWRVYSTGSNVFQTRAGCLIGAEHVNNSYECDIPIGAGICASYQTHTNSPGSASSVASQSIIAYTMSLGAENSVAYSNNSIAIPTNFTISVTTEILPVSMTKTSVDCTMYICGDSTECSNLLLQYGSFCTQLNRALTGIAVEQDKNTQEVFAQVKQIYKTPPIKDFGGFNFSQILPDPSKPSKRSPIEDLLFNKVTLADAGFIKQYGDCLGDIAARDLICAQKFNGLTVLPPLLTDEMIAQYTSALLAGTITSGWTLGAGPALQIPFPMQMAYRFNGIGVTQNVLYENQKLIANQFNSAIGKIQDSLSSTPSALGKLQDVVNQNAQALNTLVKQLSSNFGAISSVLNDILSRLDPPEAEVQIDRLITGRLQSLQTYVTQQLIRAAEIRASANLAATKMSECVLGQSKRVDFCGKGYHLMSFPQSAPHGVVFLHVTYVPAQEKNFTTAPAICHDGKAHFPREGVFVSNGTHWFVTQRNFYEPQIITTDNTFVSGNCDVVIGIVNNTVYDPLQPELDSFKEELDKYFKNHTSPDVDLGDISGINASVVNIQKEIDRLNEVAKNLNESLIDLQELGKYGSGSGSGSGSGSGSGSGSGSGSGSGSGSGSGSMENTTSGFLGPLLVLQAGFFLLTRILTIPQSLDSWWTSLNFLGGAPTCPGQNSRSPTSNHSPTSCPPICPGYRWMCLRRFIIFLFILLLCLIFLLVLLDYQGMLPVCPLLPGTSTTSTGPCKTCTNPANGTSMFPSCCCTKPSDGNCTCIPIPSSWAFARFLWEWASVRFSWLSFLVPFVQWFVGLSPTVWLSVMWMMWYWGPSLYNILSPFLPLLPIFFCLWVYI

SEQ ID NO: 121 - protein, 1464 aa, synthetic construct
  REGION 1..1464: note = Recombinant Sequence
MFVFFVLLPLVSSQCVNLTTRTQLPPAYTNSFTRGVYYPDKVFRSSVLHSTQDLFLPFFSNVTWFHAIHVSGTNGTKRFDNPVLPFNDGVYFASIEKSNIIRGWIFGTTLDSKTQSLLIVNNATNVVIKVCEFQFCNDPFLGVYYHKNNKSWMESEFRVYSSANNCTFEYVSQPFLMDLEGKQGNFKNLREFVFKNIDGYFKIYSKHTPINLVRDLPQGFSALEPLVDLPIGINITRFQTLLALHRSYLTPGGSSSGWTAGAAAYYVGYLQPRTFLLKYNENGTITDAVDCALDPLSETKCTLKSFTVEKGIYQTSNFRVQPTESIVRFPNITNLCPFGEVFNATRFASVYAWNRKRISNCVADYSVLYNSASFSTFKCYGVSPTKLNDLCFTNVYADSFVIRGDEVRQIAPGQTGKIADYNYKLPDDFTGCVIAWNSNNLDSKVGGNYNYLYRLFRKSNLKPFERDISTEIYQAGSTPCNGVKGFNCYFPLQSYGFQPTNGVGYQPYRVVVLSFELLHAPATVCGPKKSTNLVKNKCVNFNFNGLTGTGVLTESNKKFLPFQQFGRDIADTTDAVRDPQTLEILDITPCSFGGVSVITPGTNTSNQVAVLYQGVNCTEVPVAIHADQLTPTWRVYSTGSNVFQTRAGCLIGAEHVNNSYECDIPIGAGICASYQTQTNSPGSASSVASQSIIAYTMSLGVENSVAYSNNSIAIPTNFTISVTTEILPVSMTKTSVDCTMYICGDSTECSNLLLQYGSFCTQLNRALTGIAVEQDKNTQEVFAQVKQIYKTPPIKDFGGFNFSQILPDPSKPSKRSPIEDLLFNKVTLADAGFIKQYGDCLGDIAARDLICAQKFNGLTVLPPLLTDEMIAQYTSALLAGTITSGWTFGAGPALQIPFPMQMAYRFNGIGVTQNVLYENQKLIANQFNSAIGKIQDSLSSTPSALGKLQDVVNQNAQALNTLVKQLSSNFGAISSVLNDILSRLDPPEAEVQIDRLITGRLQSLQTYVTQQLIRAAEIRASANLAATKMSECVLGQSKRVDFCGKGYHLMSFPQSAPHGVVFLHVTYVPAQEKNFTTAPAICHDGKAHFPREGVFVSNGTHWFVTQRNFYEPQIITTDNTFVSGNCDVVIGIVNNTVYDPLQPELDSFKEELDKYFKNHTSPDVDLGDISGINASVVNIQKEIDRLNEVAKNLNESLIDLQELGKYGSGSGSGSGSGSGSGSGSGSGSGSGSGSGSGSMENTTSGFLGPLLVLQAGFFLLTRILTIPQSLDSWWTSLNFLGGAPTCPGQNSRSPTSNHSPTSCPPICPGYRWMCLRRFIIFLFILLLCLIFLLVLLDYQGMLPVCPLLPGTSTTSTGPCKTCTNPANGTSMFPSCCCTKPSDGNCTCIPIPSSWAFARFLWEWASVRFSWLSFLVPFVQWFVGLSPTVWLSVMWMMWYWGPSLYNILSPFLPLLPIFFCLWVYI

SEQ ID NO: 122 - protein, 1464 aa, synthetic construct
  REGION 1..1464: note = Recombinant Sequence
MFVFLVLLPLVSIQCVNLTTRTQLPPAYTNSFTRGVYYPDKVFRSSVLHSTQDLFLPFFSNVTWFHAIHVSGTNGTKRFDNPVLPFNDGVYFASTEKSNIIRGWIFGTTLDSKTQSLLIVNNATNVVIKVCEFQFCNDPFLGVYYHKNNKSCMESEFRVYSSANNCTFEYVSQPFLMDLEGKQGNFKNLREFVFKNIDGYFKIYSKHTPINLVRDLPQGFSALEPLVDLPIGINITRFQTLLALHRSYLTPGDSSSGWTAGAAAYYVGYLQPRTFLLKYNENGTITDAVDCALDPLSETKCTLKSFTVEKGIYQTSNFRVQPTESIVRFPNITNLCPFGEVFNATRFASVYAWNRKRISNCVADYSVLYNSASFSTFKCYGVSPTKLNDLCFTNVYADSFVIRGDEVRQIAPGQTGKIADYNYKLPDDFTGCVIAWNSNNLDSKVGGNYNYRYRLFRKSNLKPFERDISTEIYQAGSTPCNGVEGFNCYFPLQSYGFQPTNGVGYQPYRVVVLSFELLHAPATVCGPKKSTNLVKNKCVNFNFNGLTGTGVLTESNKKFLPFQQFGRDIADTTDAVRDPQTLEILDITPCSFGGVSVITPGTNTSNQVAVLYQGVNCTEVPVAIHADQLTPTWRVYSTGSNVFQTRAGCLIGAEHVNNSYECDIPIGAGICASYQTQTNSPGSASSVASQSIIAYTMSLGAENSVAYSNNSIAIPTNFTISVTTEILPVSMTKTSVDCTMYICGDSTECSNLLLQYGSFCTQLNRALTGIAVEQDKNTQEVFAQVKQIYKTPPIKDFGGFNFSQILPDPSKPSKRSPIEDLLFNKVTLADAGFIKQYGDCLGDIAARDLICAQKFNGLTVLPPLLTDEMIAQYTSALLAGTITSGWTFGAGPALQIPFPMQMAYRFNGIGVTQNVLYENQKLIANQFNSAIGKIQDSLSSTPSALGKLQDVVNQNAQALNTLVKQLSSNFGAISSVLNDILSRLDPPEAEVQIDRLITGRLQSLQTYVTQQLIRAAEIRASANLAATKMSECVLGQSKRVDFCGKGYHLMSFPQSAPHGVVFLHVTYVPAQEKNFTTAPAICHDGKAHFPREGVFVSNGTHWFVTQRNFYEPQIITTDNTFVSGNCDVVIGIVNNTVYDPLQPELDSFKEELDKYFKNHTSPDVDLGDISGINASVVNIQKEIDRLNEVAKNLNESLIDLQELGKYGSGSGSGSGSGSGSGSGSGSGSGSGSGSGSGSMENTTSGFLGPLLVLQAGFFLLTRILTIPQSLDSWWTSLNFLGGAPTCPGQNSRSPTSNHSPTSCPPICPGYRWMCLRRFIIFLFILLLCLIFLLVLLDYQGMLPVCPLLPGTSTTSTGPCKTCTNPANGTSMFPSCCCTKPSDGNCTCIPIPSSWAFARFLWEWASVRFSWLSFLVPFVQWFVGLSPTVWLSVMWMMWYWGPSLYNILSPFLPLLPIFFCLWVYI

SEQ ID NO: 123 - protein, 1463 aa, synthetic construct
  REGION 1..1463: note = Recombinant Sequence
MFVFLVLLPLVSSQCVNLTTRTQLPPAYTNSFTRGVYYPDKVFRSSVLHSTQDLFLPFFSNVTWFHAIHVSGTNGTKRFGNPVLPFNDGVYFASTEKSNIIRGWIFGTTLDSKTQSLLIVNNATNVVIKVCEFQFCNDPFLGVYHKNNKSWMESESRVYSSANNCTFEYVSQPFLMDLEGKQGNFKNLREFVFKNIDGYFKIYSKHTPINLVRDLPQGFSALEPLVDLPIGINITRFQTLLALHRSYLTPGDSSSGWTAGAAAYYVGYLQPRTFLLKYNENGTITDAVDCALDPLSETKCTLKSFTVEKGIYQTSNFRVQPTESIVRFPNITNLCPFGEVFNATRFASVYAWNRKRISNCVADYSVLYNSASFSTFKCYGVSPTKLNDLCFTNVYADSFVIRGDEVRQIAPGQTGKIADYNYKLPDDFTGCVIAWNSNNLDSKVGGNYNYRYRLFRKSNLKPFERDISTEIYQAGSTPCNGVEGFNCYFPLQSYGFQPTNGVGYQPYRVVVLSFELLHAPATVCGPKKSTNLVKNKCVNFNFNGLTGTGVLTESNKKFLPFQQFGRDIADTTDAVRDPQTLEILDITPCSFGGVSVITPGTNTSNQVAVLYQGVNCTEVPVAIHADQLTPTWRVYSTGSNVFQTRAGCLIGAEHVNNSYECDIPIGAGICASYQTQTNSPGSASSVASQSIIAYTMSLGAENSVAYSNNSIAIPTNFTISVTTEILPVSMTKTSVDCTMYICGDSTECSNLLLQYGSFCTQLNRALTGIAVEQDKNTQEVFAQVKQIYKTPPIKDFGGFNFSQILPDPSKPSKRSPIEDLLFNKVTLADAGFIKQYGDCLGDIAARDLICAQKFNGLNVLPPLLTDEMIAQYTSALLAGTITSGWTFGAGPALQIPFPMQMAYRFNGIGVTQNVLYENQKLIANQFNSAIGKIQDSLSSTPSALGKLQHVVNQNAQALNTLVKQLSSNFGAISSVLNDILSRLDPPEAEVQIDRLITGRLQSLQTYVTQQLIRAAEIRASANLAATKMSECVLGQSKRVDFCGKGYHLMSFPQSAPHGVVFLHVTYVPAQEKNFTTAPAICHDGKAHFPREGVFVSNGTHWFVTQRNFYEPQIITTDNTFVSGNCDVVIGIVNNTVYDPLQPELDSFKEELDKYFKNHTSPDVDLGDISGINASVVNIQKEIDRLNEVAKNLNESLIDLQELGKYGSGSGSGSGSGSGSGSGSGSGSGSGSGSGSGSMENTTSGFLGPLLVLQAGFFLLTRILTIPQSLDSWWTSLNFLGGAPTCPGQNSRSPTSNHSPTSCPPICPGYRWMCLRRFIIFLFILLLCLIFLLVLLDYQGMLPVCPLLPGTSTTSTGPCKTCTNPANGTSMFPSCCCTKPSDGNCTCIPIPSSWAFARFLWEWASVRFSWLSFLVPFVQWFVGLSPTVWLSVMWMMWYWGPSLYNILSPFLPLLPIFFCLWVYI

SEQ ID NO: 124 - protein, 1464 aa, synthetic construct
  REGION 1..1464: note = Recombinant Sequence
MFVFLVLLPLVSSQCVNLTTRTQLPPAYTNSFTRGVYYPDKVFRSSVLHSTQDLFLPFFSNVTWFHAIHVSGTNGTKRFDNPVLPFNDGVYFASTEKSNIIRGWIFGTTLDSKTQSLLIVNNATNVVIKVCEFQFCNDPFLGVYYHKNNKSWMESEFRVYSSANNCTFEYVSQPFLMDLEGKQGNFKNLREFVFKNIDGYFKIYSKHTPINLVRDLPQGFSALEPLVDLPIGINITRFQTLLALHRSYLTPGDSSSGWTAGAAAYYVGYLQPRTFLLKYNENGTITDAVDCALDPLSETKCTLKSFTVEKGIYQTSNFRVQPTESIVRFPNITNLCPFGEVFNATRFASVYAWNRKRISNCVADYSVLYNSASFSTFKCYGVSPTKLNDLCFTNVYADSFVIRGDEVRQIAPGQTGKIADYNYKLPDDFTGCVIAWNSNNLDSKVGGNYNYLYRLFRKSNLKPFERDISTEIYQAGSTPCNGVKGFNCYFPLQSYGFQPTNGVGYQPYRVVVLSFELLHAPATVCGPKKSTNLVKNKCVNFNFNGLTGTGVLTESNKKFLPFQQFGRDIADTTDAVRDPQTLEILDITPCSFGGVSVITPGTNTSNQVAVLYQGVNCTEVPVAIHADQLTPTWRVYSTGSNVFQTRAGCLIGAEHVNNSYECDIPIGAGICASYQTQTNSPGSASSVASQSIIAYTMSLGAENSVAYSNNSIAIPTNFTISVTTEILPVSMTKTSVDCTMYICGDSTECSNLLLQYGSFCTQLNRALTGIAVEQDKNTQEVFAQVKQIYKTPPIKDFGGFNFSQILPDPSKPSKRSPIEDLLFNKVTLADAGFIKQYGDCLGDIAARDLICAQKFNGLTVLPPLLTDEMIAQYTSALLAGTITSGWTFGAGPALQIPFPMQMAYRFNGIGVTQNVLYENQKLIANQFNSAIGKIQDSLSSTPSALGKLQDVVNQNAQALNTLVKQLSSNFGAISSVLNDILSRLDPPEAEVQIDRLITGRLQSLQTYVTQQLIRAAEIRASANLAATKMSECVLGQSKRVDFCGKGYHLMSFPQSAPHGVVFLHVTYVPAQEKNFTTAPAICHDGKAHFPREGVFVSNGTHWFVTQRNFYEPQIITTDNTFVSGNCDVVIGIVNNTVYDPLQPELDSFKEELDKYFKNHTSPDVDLGDISGINASFVNIQKEIDRLNEVAKNLNESLIDLQELGKYGSGSGSGSGSGSGSGSGSGSGSGSGSGSGSGSMENTTSGFLGPLLVLQAGFFLLTRILTIPQSLDSWWTSLNFLGGAPTCPGQNSRSPTSNHSPTSCPPICPGYRWMCLRRFIIFLFILLLCLIFLLVLLDYQGMLPVCPLLPGTSTTSTGPCKTCTNPANGTSMFPSCCCTKPSDGNCTCIPIPSSWAFARFLWEWASVRFSWLSFLVPFVQWFVGLSPTVWLSVMWMMWYWGPSLYNILSPFLPLLPIFFCLWVYI

SEQ ID NO: 125 - protein, 1464 aa, synthetic construct
  REGION 1..1464: note = Recombinant Sequence
MFVFLVLLPLVSSQCVNLTTRTQLPPAYTNSFTRGVYYPDKVFRSSVLHSTQDLFLPFFSNVTWFHAIHVSGTNGTKRFDNPVLPFNDGVYFASTEKSNIIRGWIFGTTLDSKTQSLLIVNNATNVVIKVCEFQFCNDPFLGVYYHKNNKSWMESELRVYSSANNCTFEYVSQPFLMDLEGKQGNFKNLREFVFKNIDGYFKIYSKHTPINLVRDLPQGFSALEPLVDLPIGINITRFQTLLALHRSYLTPGDSSSGWTAGAAAYYVGYLQPRTFLLKYNENGTITDAVDCALDPLSETKCTLKSFTVEKGIYQTSNFRVQPTESIVRFPNITNLCPFGEVFNATRFASVYAWNRKRISNCVADYSFLYNSASFSTFKCYGVSPTKLNDLCFTNVYADSFVIRGDEVRQIAPGQTGKIADYNYKLPDDFTGCVIAWNSNNLDSKVGGNYNYLYRLFRKSNLKPFERDISTEIYQAGSTPCNGVEGFNCYFPLQSYGFQPTNGVGYQPYRVVVLSFELLHAPATVCGPKKSTNLVKNKCVNFNFNGLTGTGVLTESNKKFLPFQQFGRDIADTTDAVRDPQTLEILDITPCSFGGVSVITPGTNTSNQVAVLYHGVNCTEVPVAIHADQLTPTWRVYSTGSNVFQTRAGCLIGAEHVNNSYECDIPIGAGICASYQTQTNSRGSASSVASQSIIAYTMSLGAENSVAYSNNSIAIPTNFTISVTTEILPVSMTKTSVDCTMYICGDSTECSNLLLQYGSFCTQLNRALTGIAVEQDKNTQEVFAQVKQIYKTPPIKDFGGFNFSQILPDPSKPSKRSPIEDLLFNKVTLADAGFIKQYGDCLGDIAARDLICAQKFNGLTVLPPLLTDEMIAQYTSALLAGTITSGWTFGAGPALQIPFPMQMAYRFNGIGVTQNVLYENQKLIANQFNSAIGKIQDSLSSTPSALGKLQDVVNQNAQALNTLVKQLSSNFGAISSVLNDILSRLDPPEAEVQIDRLITGRLQSLQTYVTQQLIRAAEIRASANLAATKMSECVLGQSKRVDFCGKGYHLMSFPQSAPHGVVFLHVTYVPAQEKNFTTAPAICHDGKAHFPREGVFVSNGTHWFVTQRNFYEPQIITTDNTFVSGNCDVVIGIVNNTVYDPLQPELDSFKEELDKYFKNHTSPDVDLGDISGINASVVNIQKEIDRLNEVAKNLNESLIDLQELGKYGSGSGSGSGSGSGSGSGSGSGSGSGSGSGSGSMENTTSGFLGPLLVLQAGFFLLTRILTIPQSLDSWWTSLNFLGGAPTCPGQNSRSPTSNHSPTSCPPICPGYRWMCLRRFIIFLFILLLCLIFLLVLLDYQGMLPVCPLLPGTSTTSTGPCKTCTNPANGTSMFPSCCCTKPSDGNCTCIPIPSSWAFARFLWEWASVRFSWLSFLVPFVQWFVGLSPTVWLSVMWMMWYWGPSLYNILSPFLPLLPIFFCLWVYI

SEQ ID NO: 126 - protein, 1464 aa, synthetic construct
  REGION 1..1464: note = Recombinant Sequence
MFVFFVLLPLVSSQCVNLTTRTQLPPAYTNSFTRGVYYPDKVFRSSVLHSTQDLFLPFFSNVTWFHAIHVSGTNGTKRFDNPVLPFNDGVYFASIEKSNIIRGWIFGTTLDSKTQSLLIVNNATNVVIKVCEFQFCNDPFLGVYYHKNNKSWMESEFRVYSSANNCTFEYVSQPFLMDLEGKQGNFKNLREFVFKNIDGYFKIYSKHTPINLVRDLPQGFSALEPLVDLPIGINITRFQTLLALHRSYLTPGGSSSGWTAGAAAYYVGYLQPRTFLLKYNENGTITDAVDCALDPLSETKCTLKSFTVEKGIYQTSNFRVQPTESIVRFPNITNLCPFGEVFNATRFASVYAWNRKRISNCVADYSVLYNSASFSTFKCYGVSPTKLNDLCFTNVYADSFVIRGDEVRQIAPGQTGKIADYNYKLPDDFTGCVIAWNSNNLDSKVGGNYNYLYRLFRKSNLKPFERDISTEIYQAGNTPCNGVEGFNCYFPLQSYGFQPTNGVGYQPYRVVVLSFELLHAPATVCGPKKSTNLVKNKCVNFNFNGLTGTGVLTESNKKFLPFQQFGRDIADTTDAVRDPQTLEILDITPCSFGGVSVITPGTNTSNQVAVLYQGVNCTEVPVAIHADQLTPTWRVYSTGSNVFQTRAGCLIGAEHVNNSYECDIPIGAGICASYQTQTNSPGSASSVASQSIIAYTMSLGAENSVAYSNNSIAIPTNFTISVTTEILPVSMTKTSVDCTMYICGDSTECSNLLLQYGSFCTQLNRALTGIAVEQDKNTQEVFAQVKQIYKTPPIKDFGGFNFSQILPDPSKPSKRSPIEDLLFNKVTLADAGFIKQYGDCLGDIAARDLICAQKFNGLTVLPPLLTDEMIAQYTSALLAGTITSGWTFGAGPALQIPFPMQMAYRFNGIGVTQNVLYENQKLIANQFNSAIGKIQDSLSSTPSALGKLQDVVNQNARALNTLVKQLSSNFGAISSVLNDILSRLDPPEAEVQIDRLITGRLQSLQTYVTQQLIRAAEIRASANLAATKMSECVLGQSKRVDFCGKGYHLMSFPQSAPHGVVFLHVTYVPAQEKNFTTAPAICHDGKAHFPREGVFVSNGTHWFVTQRNFYEPQIITTDNTFVSGNCDVVIGIVNNTVYDPLQPELDSFKEELDKYFKNHTSPDVDLGDISGINASVVNIQKEIDRLNEVAKNLNESLIDLQELGKYGSGSGSGSGSGSGSGSGSGSGSGSGSGSGSGSMENTTSGFLGPLLVLQAGFFLLTRILTIPQSLDSWWTSLNFLGGAPTCPGQNSRSPTSNHSPTSCPPICPGYRWMCLRRFIIFLFILLLCLIFLLVLLDYQGMLPVCPLLPGTSTTSTGPCKTCTNPANGTSMFPSCCCTKPSDGNCTCIPIPSSWAFARFLWEWASVRFSWLSFLVPFVQWFVGLSPTVWLSVMWMMWYWGPSLYNILSPFLPLLPIFFCLWVYI

SEQ ID NO: 127 - protein, 1459 aa, synthetic construct
  REGION 1..1459: note = Recombinant Sequence
MFVFLVLLPLVSSQCVNLTTRTQLPPAYTNSFTRGVYYPDKVFRSSVLHSTQDLFLPFFSNVTWFHAIHVSGTNGTKRFDNPVLPFNDGVYFASTEKSNIIRGWIFGTTLDSKTQSLLIVNNATNVVIKVCEFQFCNDPFYYHKNNKSWMESEFRVYSSANNCTFEYVSQPFLMDLEGKQGNFKNLREFVFKNIDGYFKIYSKHTPINLVRDLPQGFSALEPLVDLPIGINITRFQTLLHRSYLTPGDSSSGWTAGAAACYVGYLQPRTFLLKYNENGTITDAVDCALDPLSETKCTLKSFTVEKGIYQTSNFRVQPTESIVRFPNITNLCPFGEVFNATRFASVYAWNRKRISNCVADYSVLYNSASFSTFKCYGVSPTKLNDLCFTNVYADSFVIRGDEVRQIAPGQTGKIADYNYKLPDDFTGCVIAWNSNNLDSKVGGNYNYLYRLFRKSNLKPFERDISTEIYQAGSTPCNGVKGFNCYFPLQSYGFQPTYGVGYQPYRVVVLSFELLHAPATVCGPKKSTNLVKNKCVNFNFNGLTGTGVLTESNKKFLPFQQFGRDIADTTDAVRDPQTLEILDITPCSFGGVSVITPGTNTSNQVAVLYQGVNCTEVPVAIHADQLTPTWRVYSTGSNVFQTRAGCLIGAEHVNNSYECDIPIGAGICASYQTQTNSHGSASSVASQSIIAYTMSLGAENSVAYSNNSIAIPTNFTISVTTEILPVSMTKTSVDCTMYICGDSTECSNLLLQYGSFCTQLNRALTGIAVEQDKNTQEVFAQVKQIYKTPPIKDFGGFNFSQILPDPSKPSKRSPIEDLLFNKVTLADAGFIKQYGDCLGDIAARDLICAQKFNGLTVLPPLLTDEMIAQYTSALLAGTITSGWTFGAGPALQIPFPMQMAYRFNGIGVTQNVLYENQKLIANQFNSAIGKIQDSLSSTPSALGKLQDVVNQNAQALNTLVKQLSSNFGAISSVLNDILSRLDPPEAEVQIDRLITGRLQSLQTYVTQQLIRAAEIRASANLAATKMSECVLGQSKRVDFCGKGYHLMSFPQSAPHGVVFLHVTYVPAQEKNFTTAPAICHDGKAHFPRKGVFVSNGTYWFVTQRNFYEPQIITTDNTFVSGNCDVVIGIVNNTVYDPLQPELDSFKEELDKYFKNHTSPDVDLGDISGINASFVNIQKEIDRLNEVAKNLNESLIDLQELGKYGSGSGSGSGSGSGSGSGSGSGSGSGSGSGSGSMENTTSGFLGPLLVLQAGFFLLTRILTIPQSLDSWWTSLNFLGGAPTCPGQNSRSPTSNHSPTSCPPICPGYRWMCLRRFIIFLFILLLCLIFLLVLLDYQGMLPVCPLLPGTSTTSTGPCKTCTNPANGTSMFPSCCCTKPSDGNCTCIPIPSSWAFARFLWEWASVRFSWLSFLVPFVQWFVGLSPTVWLSVMWMMWYWGPSLYNILSPFLPLLPIFFCLWVYI

SEQ ID NO: 128 - protein, 1464 aa, synthetic construct
  REGION 1..1464: note = Recombinant Sequence
MFVFLVLLPLVSSQCVNFTTRTQLPPAYTNSFTRGVYYPDKVFRSSVLHSTQDLFLPFFSNVTWFHAIHVSGTNGTKRFDNPVLPFNDGVYFASTEKSNIIRGWIFGTTLDSKTQSLLIVNNATNVVIKVCEFQFCNDPFLGVYYHKNNKSWMESEFRVYSSANNCTFEYVSQPFLMDLEGKQGNFKNLREFVFKNIDGYFKIYSKHTPINLVRDLPQGFSALEPLVDLPIGINITRFQTLLALHRSYLTPGDSSSGWTAGAAAYYVGYLQPRTFLLKYNENGTITDAVDCALDPLSETKCTLKSFTVEKGIYQTSNFRVQPTESIVRFPNITNLCPFGEVFNATRFASVYAWNRKRISNCVADYSVLYNSASFSTFKCYGVSPTKLNDLCFTNVYADSFVIRGDEVRQIAPGQTGKIADYNYKLPDDFTGCVIAWNSNNLDSKVGGNYNYRYRLFRKSNLKPFERDISTEIYQAGSTPCNGVEGFNCYFPLQSYGFQPTYGVGYQPYRVVVLSFELLHAPATVCGPKKSTNLVKNKCVNFNFNGLTGTGVLTESNKKFLPFQQFGRDIADTTDAVRDPQTLEILDITPCSFGGVSVITPGTNTSNQVAVLYQGVNCTEVPVAIHADQLTPTWRVYSTGSNVFQTRAGCLIGVEYVNNSYECDIPIGAGICASYQTQTNSPGSASSVASQSIIAYTMSLGAENSVAYSNNSIAIPTNFTISVTTEILPVSMTKTSVDCTMYICGDSTECSNLLLQYGSFCTQLNRALTGIAVEQDKNTQEVFAQVKQIYKTPPIKYFGGFNFSQILPDPSKPSKRSPIEDLLFNKVTLADAGFIKQYGDCLGDIAARDLICAQKFNGLTVLPPLLTDEMIAQYTSALLAGTITSGWTFGAGPALQIPFPMQMAYRFNGIGVTQNVLYENQKLIANQFNSAIGKIQDSLSSTPSALGKLQDVVNQNAQALNTLVKQLSSNFGAISSVLNDILSRLDPPEAEVQIDRLITGRLQSLQTYVTQQLIRAAEIRASANLAATKMSECVLGQSKRVDFCGKGYHLMSFPQSAPHGVVFLHVTYVPAQEKNFTTAPAICHDGKAHFPREGVFVSNGTHWFVTQRNFYEPQIITTDNTFVSGNCDVVIGIVNNTVYDPLQPELDSFKEELDKYFKNHTSPDVDLGDISGINASVVNIQKEIDRLNEVAKNLNESLIDLQELGKYGSGSGSGSGSGSGSGSGSGSGSGSGSGSGSGSMENTTSGFLGPLLVLQAGFFLLTRILTIPQSLDSWWTSLNFLGGAPTCPGQNSRSPTSNHSPTSCPPICPGYRWMCLRRFIIFLFILLLCLIFLLVLLDYQGMLPVCPLLPGTSTTSTGPCKTCTNPANGTSMFPSCCCTKPSDGNCTCIPIPSSWAFARFLWEWASVRFSWLSFLVPFVQWFVGLSPTVWLSVMWMMWYWGPSLYNILSPFLPLLPIFFCLWVYI

SEQ ID NO: 129 - protein, 1464 aa, synthetic construct
  REGION 1..1464: note = Recombinant Sequence
MFVFLVLLPLVSSQCVNLTTRTQLPPAYTNSFTRGVYYPDKVFRSSVLHSTQDLFLPFFSNVTWFHAIHVSGTNGTKRFDNPVLPFNDGVYFASTEKSNIIRGWIFGTTLDSKTQSLLIVNNATNVVIKVCEFQFCNDPFLGVYYHKNNKSWMESEFRVYSSANNCTFEYVSQPFLMDLEGKQGNFKNLREFVFKNIDGYFKIYSKHTPINLVRDLPQGFSALEPLVDLPIGINITRFQTLLALHRSYLTPGDSSSGWTAGAAAYYVGYLQPRTFLLKYNENGTITDAVDCALDPLSETKCTLKSFTVEKGIYQTSNFRVQPTESIVRFPNITNLCPFGEVFNATRFASVYAWNRKRISNCVADYSVLYNSASFSTFKCYGVSPTKLNDLCFTNVYADSFVIRGDEVRQIAPGQTGKIADYNYKLPDDFTGCVIAWNSNNLDSKVGGNYNYLYRLFRKSNLKPFERDISTEIYQAGSTPCNGVEGFNCYFPLQSYGFQPTTGVGYQPYRVVVLSFELLHAPATVCGPKKSTNLVKNKCVNFNFNGLTGTGVLTESNKKFLPFQQFGRDIADTTDAVRDPQTLEILDITPCSFGGVSVITPGTNTSNQVAVLYQDVNCTEVPVAIHADQLTPTWRVYSTGSNVFQTRAGCLIGAEHVNNSYECDIPIGAGICASYQTQTNSPGSASSVASQSIIAYTMSLGAENSVAYSNNSIAIPTNFTISVTTEILPVSMTKTSVDCTMYICGDSTECSNLLLQYGSFCTQLNRALTGIAVEQDKNTQEVFAQVKQIYKTPPIKDFGGFNFSQILPDPSKPSKRSPIEDLLFNKVTLADAGFIKQYGDCLGDIAARDLICAQKFNGLTVLPPLLTDEMIAQYTSALLAGTITSGWTFGAGPALQIPFPMQMAYRFNGIGVTQNVLYENQKLIANQFNSAIGKIQDSLSSTPSALGKLQDVVNQNAQALNTLVKQLSSNFGAISSVLNDILSRLDPPEAEVQIDRLITGRLQSLQTYVTQQLIRAAEIRASANLAATKMSECVLGQSKRVDFCGKGYHLMSFPQSAPHGVVFLHVTYVPAQEKNFTTAPAICHDGKAHFPREGVFVSNGTHWFVTQRNFYEPQIITTDNTFVSGNCDVVIGIVNNTVYDPLQPELDSFKEELDKYFKNHTSPDVDLGDISGINASVVNIQKEIDRLNEVAKNLNESLIDLQELGKYGSGSGSGSGSGSGSGSGSGSGSGSGSGSGSGSMENTTSGFLGPLLVLQAGFFLLTRILTIPQSLDSWWTSLNFLGGAPTCPGQNSRSPTSNHSPTSCPPICPGYRWMCLRRFIIFLFILLLCLIFLLVLLDYQGMLPVCPLLPGTSTTSTGPCKTCTNPANGTSMFPSCCCTKPSDGNCTCIPIPSSWAFARFLWEWASVRFSWLSFLVPFVQWFVGLSPTVWLSVMWMMWYWGPSLYNILSPFLPLLPIFFCLWVYI

SEQ ID NO: 130 - protein, 1464 aa, synthetic construct
  REGION 1..1464: note = Recombinant Sequence
MFVFFVLLPLVSSQCVNLTTRTQLPPAYTNSFTRGVYYPDKVFRSSVLHSTQDLFLPFFSNVTWFHAIHVSGTNGTKRFDNPVLPFNDGVYFASIEKSNIIRGWIFGTTLDSKTQSLLIVNNATNVVIKVCEFQFCNDPFLGVYYHKNNKSWMESEFRVYSSANNCTFEYVSQPFLMDLEGKQGNFKNLREFVFKNIDGYFKIYSKHTPINLVRDLPQGFSALEPLVDLPIGINITRFQTLLALHRSYLTPGGSSSGWTAGAAAYYVGYLQPRTFLLKYNENGTITDAVDCALDPLSETKCTLKSFTVEKGIYQTSNFRVQPTESIVRFPNITNLCPFGEVFNATRFASVYAWNRKRISNCVADYSVLYNSASFSTFKCYGVSPTKLNDLCFTNVYADSFVIRGDEVRQIAPGQTGKIADYNYKLPDDFTGCVIAWNSNNLDSKVGGNYNYLYRLFRKSNLKPFERDISTEIYQAGSTPCNGVEGFNCYFPLQSYGFQPTNGVGYQPYRVVVLSFELLHAPATVCGPKKSTNLVKNKCVNFNFNGLTGTGVLTESNKKFLPFQQFGRDIADTTDAVRDPQTLEILDITPCSFGGVSVITPGTNTSNQVAVLYQGVNCTEVPVAIHADQLTPTWRVYSTGSNVFQTRAGCLIGAEHVNNSYECDIPIGAGICASYQTQTNSPGSASSVASQSIIAYTMSLGVENSVAYSNNSIAIPTNFTISVTTEILPVSMTKTSVDCTMYICGDSTECSNLLLQYGSFCTQLNRALTGIAVEQDKNTQEVFAQVKQIYKTPPIKDFGGFNFSQILPDPSKPSKRSPIEDLLFNKVTLADAGFIKQYGDCLGDIAARDLICAQKFNGLTVLPPLLTDEMIAQYTSALLAGTITSGWTFGAGPALQIPFPMQMAYRFNGIGVTQNVLYENQKLIANQFNSAIGKIQDSLSSTPSALGKLQDVVNQNAQALNTLVKQLSSNFGAISSVLNDILSRLDPPEAEVQIDRLITGRLQSLQTYVTQQLIRAAEIRASANLAATKMSECVLGQSKRVDFCGKGYHLMSFPQSAPHGVVFLHVTYVPAQEKNFTTAPAICHDGKAHFPREGVFVSNGTHWFVTQRNFYEPQIITTDNTFVSGNCDVVIGIVNNTVYDPLQPELDSFKEELDKYFKNHTSPDVDLGDISGINASVVNIQKEIDRLNEVAKNLNESLIDLQELGKYGSGSGSGSGSGSGSGSGSGSGSGSGSGSGSGSMENTTSGFLGPLLVLQAGFFLLTRILTIPQSLDSWWTSLNFLGGAPTCPGQNSRSPTSNHSPTSCPPICPGYRWMCLRRFIIFLFILLLCLIFLLVLLDYQGMLPVCPLLPGTSTTSTGPCKTCTNPANGTSMFPSCCCTKPSDGNCTCIPIPSSWAFARFLWEWASVRFSWLSFLVPFVQWFVGLSPTVWLSVMWMMWYWGPSLYNILSPFLPLLPIFFCLWVYI

SEQ ID NO: 131 - protein, 1464 aa, synthetic construct
  REGION 1..1464: note = Recombinant Sequence
MFVFLVLLPLVSSQCVNLTTRTQLPPAYTNSFTRGVYYPDKVFRSSVLHSTQDLFLPFFSNVTWFHAIHVSGTNGTKRFDNPVLPFNDGVYFASTEKSNIIRGWIFGTTLDSKTQSLLIVNNATNVVIKVCEFQFCNDPFLSVYYHKNNKSWMESEFRVYSSANNCTFEYVSQPFLMDLVGKQGNFKNLREFVFKNIDGYFKIYSKHTPINLVRDLPQGFSALEPLVDLPIGINITRFQTLLALHRSYLTPGDSSSGWTAGAAAYYVGYLQPRTFLLKYNENGTITDAVDCALDPLSETKCTLKSFTVEKGIYQTSNFRVQPTESIVRFPNITNLCPFGEVFNATRFASVYAWNRKRISNCVADYSVLYNSASFSTFKCYGVSPTKLNDLCFTNVYADSFVIRGDEVRQIAPGQTGKIADYNYKLPDDFTGCVIAWNSNNLDSKVGGNYNYLYRLFRKSNLKPFERDISTEIYQAGSTPCNGVEGFNCYFPLQSYGFQPTNGVGYQPYRVVVLSFELLHAPATVCGPKKSTNLVKNKCVNFNFNGLTGTGVLTESNKKFLPFQQFGRDIADTTDAVRDPQTLEILDITPCSFGGVSVITPGTNTSNQVAVLYQGVNCTEVPVAIHADQLTPTWRVYSTGSNVFQTRAGCLIGAEHVNNSYECDIPIGAGICASYQTHTNSPGSASSVASQSIIAYTMSLGAENSVAYSNNSIAIPTNFTISVTTEILPVSMTKTSVDCTMYICGDSTECSNLLLQYGSFCTQLNRALTGIAVEQDKNTQEVFAQVKQIYKTPPIKDFGGFNFSQILPDPSKPSKRSPIEDLLFNKVTLADAGFIKQYGDCLGDIAARDLICAQKFNGLTVLPPLLTDEMIAQYTSALLAGTITSGWTFGAGPALQIPFPMQMAYRFNGIGVTQNVLYENQKLIANQFNSAIGKIQDSLSSTPSALGKLQDVVNQNAQALNTLVKQLSSNFGAISSVLNDILSRLDPPEAEVQIDRLITGRLQSLQTYVTQQLIRAAEIRASANLAATKMSECVLGQSKRVDFCGKGYHLMSFPQSAPHGVVFLHVTYVPAQEKNFTTAPAICHDGKAHFPREGVFVSNGTHWFVTQRNFYEPQIITTDNTFVSGNCDVVIGIVNNTVYDPLQPELDSFKEELDKYFKNHTSPDVDLGDISGINASVVNIQKEIDRLNEVAKNLNESLIDLQELGKYGSGSGSGSGSGSGSGSGSGSGSGSGSGSGSGSMENTTSGFLGPLLVLQAGFFLLTRILTIPQSLDSWWTSLNFLGGAPTCPGQNSRSPTSNHSPTSCPPICPGYRWMCLRRFIIFLFILLLCLIFLLVLLDYQGMLPVCPLLPGTSTTSTGPCKTCTNPANGTSMFPSCCCTKPSDGNCTCIPIPSSWAFARFLWEWASVRFSWLSFLVPFVQWFVGLSPTVWLSVMWMMWYWGPSLYNILSPFLPLLPIFFCLWVYI

SEQ ID NO: 132 - protein, 1464 aa, synthetic construct
  REGION 1..1464: note = Recombinant Sequence
MFVFLVLLPLVSSQCVNLTTRTQLPPAYTNSFTRGVYYPDKVFRSSVLHSTQDLFLPFFSNVTWFHAIHVSGTNGTKRFDNPVLPFNDGVYFASTEKSNIIRGWIFGTTLDSKTQSLLIVNNATNVVIKVCEFQFCNDPFLGVYYHKNNKSWMESEFRVYSSANNCTFEYVSQPFLMDLEGKQGNFKNLREFVFKNIDGYFKIYSKHTPINLVRDLPQGFSALEPLVDLPIGINITRFQTLLALHRSYLTPGDSSSGWTAGAAAYYVGYLQPRTFLLKYNENGTITDAVDCALDPLSETKCTLKSFTVEKGIYQTSNFRVQPTESIVRFPNITNLCPFGEVFNATRFASVYAWNRKRISNCVADYSVLYNSASFSTFKCYGVSPTKLNDLCFTNVYADSFVIRGDEVRQIAPGQTGKIADYNYKLPDDFTGCVIAWNSNNLDSKVGGNYNYLYRLFRKSNLKPFERDISTEIYQAGSTPCNGVKGFNCYFPLQPYGFQPTYGVGYQPYRVVVLSFELLHAPATVCGPKKSTNLVKNKCVNFNFNGLTGTGVLTESNKKFLPFQQFGRDIADTTDAVRDPQTLEILDITPCSFGGVSVITPGTNTSNQVAVLYQGVNCTEVPVAIHADQLTPTWRVYSTGSNVFQTRAGCLIGAEHVNNSYECDIPIGAGICASYQTQTNSHGSASSVASQSIIAYTMSLGAENSVAYSNNSIAIPTNFTISVTTEILPVSMTKTSVDCTMYICGDSTECSNLLLQYGSFCTQLNRALTGIAVEQDKNTQEVFAQVKQIYKTPPIKDFGGFNFSQILPDPSKPSKRSPIEDLLFNKVTLADAGFIKQYGDCLGDIAARDLICAQKFNGLTVLPPLLTDEMIAQYTSALLAGTITSGWTFGAGPALQIPFPMQMAYRFNGIGVTQNVLYENQKLIANQFNSAIGKIQDSLSSTPSALGKLQDVVNQNAQALNTLVKQLSSNFGAISSVLNDILSRLDPPEAEVQIDRLITGRLQSLQTYVTQQLIRAAEIRASANLAATKMSECVLGQSKRVDFCGKGYHLMSFPQSAPHGVVFLHVTYVPAQEKNFTTAPAICHDGKAHFPREGVFVSNGTHWFVTQRNFYKPQIITTDNTFVSGNCDVVIGIVNNTVYDPLQPELDSFKEELDKYFKNHTSPDVDLGDISGINASVVNIQKEIDRLNEVAKNLNESLIDLQELGKYGSGSGSGSGSGSGSGSGSGSGSGSGSGSGSGSMENTTSGFLGPLLVLQAGFFLLTRILTIPQSLDSWWTSLNFLGGAPTCPGQNSRSPTSNHSPTSCPPICPGYRWMCLRRFIIFLFILLLCLIFLLVLLDYQGMLPVCPLLPGTSTTSTGPCKTCTNPANGTSMFPSCCCTKPSDGNCTCIPIPSSWAFARFLWEWASVRFSWLSFLVPFVQWFVGLSPTVWLSVMWMMWYWGPSLYNILSPFLPLLPIFFCLWVYI

SEQ ID NO: 133 - protein, 1463 aa, synthetic construct
  REGION 1..1463: note = Recombinant Sequence
MFVFLVLLPLVSSQCVNLTTRTQLPPAYTNSFTRGVYYPDKVFRSSVLHSTQDLFLPFFSNVTWFDAIHVSGTNGTKRFDNPVLPFNDGVYFASTEKSNIIRGWIFGTTLDSKTQSLLIVNNATNVVIKVCEFQFCNDPFLVVYHKNNKSWMESEFRVYSSANNCTFEYVSQPFLMDLEGKQGNFKNLREFVFKNIDGYFKIYSKHTPINLVRGLPQGFSALEPLVDLPIGINITRFQTLLALHRSYLTPGDSSSGWTAGAAAYYVGYLQPRTFLLKYNENGTITDAVDCALDPLSETKCTLKSFTVEKGIYQTSNFRVQPTESIVRFPNITNLCPFGEVFNATRFASVYAWNRKRISNCVADYSVLYNSASFSTFKCYGVSPTKLNDLCFTNVYADSFVIRGDEVRQIAPGQTGKIADYNYKLPDDFTGCVIAWNSNNLDSKVGGNYNYLYRLFRKSNLKPFERDISTEIYQAGSTPCNGAEGFNCYFPLQSYGFQPTNGVGYQPYRVVVLSFELLHAPATVCGPKKSTNLVKNKCVNFNFNGLTGTGVLTESNKKFLPFQQFGRDIADTTDAVRDPQTLEILDITPCSFGGVSVITPGTNTSNQVAVLYQDVNCTEVPVAIHADQLTPTWRVYSTGSNVFQTRAGCLIGAEYVNNSYECDIPIGASICASYQTQTNSPGSASSVASQSIIAYTMSLGAENSVAYSNNSIAIPTNFTISVTTEILPVSMTKTSVDCTMYICGDSTECSNLLLQYGSFCTQLNRALTGIAVEQDKNTQEVFAQVKQIYKTPPIKDFGGFNFSQILPDPSKPSKRSPIEDLLFNKVTLADAGFIKQYGDCLGDIAARDLICAQKFNGLTVLPPLLTDEMIAQYTSALLAGTITSGWTFGAGPALQIPFPMQMAYRFNGIGVTQNVLYENQKLIANQFNSAIGKIQDSLSSTPSALGKLRDVVNQNAQALNTLVKQLSSNFGAISSVLNDILSRLDPPEAEVQIDRLITGRLQSLQTYVTQQLIRAAEIRASANLAATKMSECVLGQSKRVDFCGKGYHLMSFPQSAPHGVVFLHVTYVPAQEKNFTTAPAICHDGKDHFPREGVFVSNGTHWFVTQRNFYEPQIITTDNTFVSGNCDVVIGIVNNTVYDPLQPELDSFKEELDKYFKNHTSPDVDLGDISGINASVVNIQKEIDRLNEVAKNLNESLIDLQELGKYGSGSGSGSGSGSGSGSGSGSGSGSGSGSGSGSMENTTSGFLGPLLVLQAGFFLLTRILTIPQSLDSWWTSLNFLGGAPTCPGQNSRSPTSNHSPTSCPPICPGYRWMCLRRFIIFLFILLLCLIFLLVLLDYQGMLPVCPLLPGTSTTSTGPCKTCTNPANGTSMFPSCCCTKPSDGNCTCIPIPSSWAFARFLWEWASVRFSWLSFLVPFVQWFVGLSPTVWLSVMWMMWYWGPSLYNILSPFLPLLPIFFCLWVYI

SEQ ID NO: 134 - protein, 1464 aa, synthetic construct
  REGION 1..1464: note = Recombinant Sequence
MFVFLVLLPLVSSQCVNLTTRTQLPPAYTNSFTRGVYYPDKVFRSSVLHSTQDLFLPFFSNVTWFHAIHVSGTNGTKRFDNPVLPFNDGVYFASTEKSNIIRGWIFGTTLDSKTQSLLIVNNATNVVIKVCEFQFCNDPFLGVYYHKNNKSWMESEFRVYSSANNCTFEYVSQPFLMDLEGKQGNFKNLREFVFKNIDGYFKIYSKHTPINLVRDLPQGFSALEPLVDLPIGINITRFQTLLALHRSYLTPGDSSSGWTAGAAAYYVGYLQPRTFLLKYNENGTITDAVDCALDPLSETKCTLKSFTVEKGIYQTSNFRVQPTESIVRFPNITNLCPFGEVFNATRFASVYAWNRKRISNCVADYSVLYNSASFSTFKCYGVSPTKLNDLCFTNVYADSFVIRGDEVRQIAPGQTGKIADYNYKLPDDFTGCVIAWNSNNLDSKVGGNYNYLYRLFRKSNLKPFERDISTEIYQAGSTPCNGVEGFNCYFPLQPYGFQPTNGVGYQPYRVVVLSFELLHAPATVCGPKKSTNLVKNKCVNFNFNGLTGTGVLTESNKKFLPFQQFGRDIADTTDAVRDPQTLEILDITPCSFGGVSVITPGTNTSNQVAVLYQGVNCTEVPVAIHADQLTPTWRVYSTGSNVFQTRAGCLIGAEHVNNSYECDIPIGAGICASYQTQTNSHGSASSVASQSIIAYTMSLGAENSVAYSNNSIAIPINFTISVTTEILPVSMTKTSVDCTMYICGDSTECSNLLLQYGSFCTQLNRALTGIAVEQDKNTQEVFAQVKQIYKTPPIKDFGGFNFSQILPDPSKPSKRSPIEDLLFNKVTLADAGFIKQYGDCLGDIAARDLICAQKFNGLTVLPPLLTDEMIAQYTSALLAGTITSGWTFGAGPALQIPFPMQMAYRFNGIGVTQNVLYENQKLIANQFNSAIGKIQDSLSSTPSALGKLQDVVNQNAQALNTLVKQLSSNFGAISSVLNDILSRLDPPEAEVQIDRLITGRLQSLQTYVTQQLIRAAEIRASANLAATKMSECVLGQSKRVDFCGKGYHLMSFPQSAPHGVVFLHVTYVPAQEKNFTTAPAICHDGKAHFPREGVFVSNGTHWFVTQRNFYEPQIITTDNTFVSGNCDVVIGIVNNTVYDPLQPELDSFKEELDKYFKNHTSPDVDLGDISGINASVVNIQKEIDRLNEVAKNLNESLIDLQELGKYGSGSGSGSGSGSGSGSGSGSGSGSGSGSGSGSMENTTSGFLGPLLVLQAGFFLLTRILTIPQSLDSWWTSLNFLGGAPTCPGQNSRSPTSNHSPTSCPPICPGYRWMCLRRFIIFLFILLLCLIFLLVLLDYQGMLPVCPLLPGTSTTSTGPCKTCTNPANGTSMFPSCCCTKPSDGNCTCIPIPSSWAFARFLWEWASVRFSWLSFLVPFVQWFVGLSPTVWLSVMWMMWYWGPSLYNILSPFLPLLPIFFCLWVYI

SEQ ID NO: 135 - protein, 1503 aa, synthetic construct
  REGION 1..1503: note = Recombinant Sequence
MFVFLVLLPLVSSQCVNLTTRTQLPPAYTNSFTRGVYYPDKVFRSSVLHSTQDLFLPFFSNVTWFHAIHVSGTNGTKRFDNPVLPFNDGVYFASTEKSNIIRGWIFGTTLDSKTQSLLIVNNATNVVIKVCEFQFCNDPFLGVYYHKNNKSWMESEFRVYSSANNCTFEYVSQPFLMDLEGKQGNFKNLREFVFKNIDGYFKIYSKHTPINLVRDLPQGFSALEPLVDLPIGINITRFQTLLALHRSYLTPGDSSSGWTAGAAAYYVGYLQPRTFLLKYNENGTITDAVDCALDPLSETKCTLKSFTVEKGIYQTSNFRVQPTESIVRFPNITNLCPFGEVFNATRFASVYAWNRKRISNCVADYSVLYNSASFSTFKCYGVSPTKLNDLCFTNVYADSFVIRGDEVRQIAPGQTGKIADYNYKLPDDFTGCVIAWNSNNLDSKVGGNYNYLYRLFRKSNLKPFERDISTEIYQAGSTPCNGVEGFNCYFPLQSYGFQPTNGVGYQPYRVVVLSFELLHAPATVCGPKKSTNLVKNKCVNFNFNGLTGTGVLTESNKKFLPFQQFGRDIADTTDAVRDPQTLEILDITPCSFGGVSVITPGTNTSNQVAVLYQDVNCTEVPVAIHADQLTPTWRVYSTGSNVFQTRAGCLIGAEHVNNSYECDIPIGAGICASYQTQTNSPGSASSVASQSIIAYTMSLGAENSVAYSNNSIAIPTNFTISVTTEILPVSMTKTSVDCTMYICGDSTECSNLLLQYGSFCTQLNRALTGIAVEQDKNTQEVFAQVKQIYKTPPIKDFGGFNFSQILPDPSKPSKRSPIEDLLFNKVTLADAGFIKQYGDCLGDIAARDLICAQKFNGLTVLPPLLTDEMIAQYTSALLAGTITSGWTFGAGPALQIPFPMQMAYRFNGIGVTQNVLYENQKLIANQFNSAIGKIQDSLSSTPSALGKLQDVVNQNAQALNTLVKQLSSNFGAISSVLNDILSRLDPPEAEVQIDRLITGRLQSLQTYVTQQLIRAAEIRASANLAATKMSECVLGQSKRVDFCGKGYHLMSFPQSAPHGVVFLHVTYVPAQEKNFTTAPAICHDGKAHFPREGVFVSNGTHWFVTQRNFYEPQIITTDNTFVSGNCDVVIGIVNNTVYDPLQPELDSFKEELDKYFKNHTSPDVDLGDISGINASVVNIQKEIDRLNEVAKNLNESLIDLQELGKYGSGSGSGSGSGSGSGSMQWNSSTFHQALLDPRVRGLYFPAGGSSSGTVNPVPTTASPISSIFSRTGDPAPNMESTTSGFLGPLLALQAGFFLLTRILTIPQSLDSWWTSLNFLGGAPTCPGQNLQSPTSNHSPTSCPPICPGYRWMCLRRFIIFLFILLLCLIFLLVLLDYQGMLPVCPLLPGTSTTSTGPCKTCTIPAQGTSMFPSCCCTKPSDGNCTCIPIPSSWAFARFLWEWASVRFSWLSLLVPFVQWFVGLSPTVWLSVIWMMWYWGPSLYNILNPFLPLLPIFFCLWVYI

SEQ ID NO: 136 - protein, 1501 aa, synthetic construct
  REGION 1..1501: note = Recombinant Sequence
MFVFLVLLPLVSSQCVNLRTRTQLPPAYTNSFTRGVYYPDKVFRSSVLHSTQDLFLPFFSNVTWFHAIHVSGTNGTKRFDNPVLPFNDGVYFASTEKSNIIRGWIFGTTLDSKTQSLLIVNNATNVVIKVCEFQFCNDPFLDVYYHKNNKSWMESGVYSSANNCTFEYVSQPFLMDLEGKQGNFKNLREFVFKNIDGYFKIYSKHTPINLVRDLPQGFSALEPLVDLPIGINITRFQTLLALHRSYLTPGDSSSGWTAGAAAYYVGYLQPRTFLLKYNENGTITDAVDCALDPLSETKCTLKSFTVEKGIYQTSNFRVQPTESIVRFPNITNLCPFGEVFNATRFASVYAWNRKRISNCVADYSVLYNSASFSTFKCYGVSPTKLNDLCFTNVYADSFVIRGDEVRQIAPGQTGKIADYNYKLPDDFTGCVIAWNSNNLDSKVGGNYNYRYRLFRKSNLKPFERDISTEIYQAGSKPCNGVEGFNCYFPLQSYGFQPTNGVGYQPYRVVVLSFELLHAPATVCGPKKSTNLVKNKCVNFNFNGLTGTGVLTESNKKFLPFQQFGRDIADTTDAVRDPQTLEILDITPCSFGGVSVITPGTNTSNQVAVLYQGVNCTEVPVAIHADQLTPTWRVYSTGSNVFQTRAGCLIGAEHVNNSYECDIPIGAGICASYQTQTNSRGSASSVASQSIIAYTMSLGAENSVAYSNNSIAIPTNFTISVTTEILPVSMTKTSVDCTMYICGDSTECSNLLLQYGSFCTQLNRALTGIAVEQDKNTQEVFAQVKQIYKTPPIKDFGGFNFSQILPDPSKPSKRSPIEDLLFNKVTLADAGFIKQYGDCLGDIAARDLICAQKFNGLTVLPPLLTDEMIAQYTSALLAGTITSGWTFGAGPALQIPFPMQMAYRFNGIGVTQNVLYENQKLIANQFNSAIGKIQDSLSSTPSALGKLQNVVNQNAQALNTLVKQLSSNFGAISSVLNDILSRLDPPEAEVQIDRLITGRLQSLQTYVTQQLIRAAEIRASANLAATKMSECVLGQSKRVDFCGKGYHLMSFPQSAPHGVVFLHVTYVPAQEKNFTTAPAICHDGKAHFPREGVFVSNGTHWFVTQRNFYEPQIITTDNTFVSGNCDVVIGIVNNTVYDPLQPELDSFKEELDKYFKNHTSPDVDLGDISGINASVVNIQKEIDRLNEVAKNLNESLIDLQELGKYGSGSGSGSGSGSGSGSMQWNSSTFHQALLDPRVRGLYFPAGGSSSGTVNPVPTTASPISSIFSRTGDPAPNMESTTSGFLGPLLALQAGFFLLTRILTIPQSLDSWWTSLNFLGGAPTCPGQNLQSPTSNHSPTSCPPICPGYRWMCLRRFIIFLFILLLCLIFLLVLLDYQGMLPVCPLLPGTSTTSTGPCKTCTIPAQGTSMFPSCCCTKPSDGNCTCIPIPSSWAFARFLWEWASVRFSWLSLLVPFVQWFVGLSPTVWLSVIWMMWYWGPSLYNILNPFLPLLPIFFCLWVYI

SEQ ID NO: 137 - protein, 1501 aa, synthetic construct
  REGION 1..1501: note = Recombinant Sequence
MFVFLVLLPLVSSQCVNLRTRTQLPPAYTNSFTRGVYYPDKVFRSSVLHSTQDLFLPFFSNVTWFHAIHFSGTNGTKRFDNPVLPFNDGVYFASIEKSNIIRGWIFGTTLDSKTQSLLIVNNATNVVIKVCEFQFCNDPFLDVYYHKNNKSWMESGVYSSANNCTFEYVSQPFLMDLEGKQGNFKNLREFVFKNIDGYFKIYSKHTPINLVRDLPQGFSVLEPLVDLPIGINITRFQTLLALHRSYLTPGDSSSGLTAGAAAYYVGYLQPRTFLLKYNENGTITDAVDCALDPLSETKCTLKSFTVEKGIYQTSNFRVQPTESIVRFPNITNLCPFGEVFNATRFASVYAWNRKRISNCVADYSVLYNSASFSTFKCYGVSPTKLNDLCFTNVYADSFVIRGDEVRQIAPGQTGNIADYNYKLPDDFTGCVIAWNSNNLDSKVGGNYNYRYRLFRKSNLKPFERDISTEIYQAGSKPCNGVEGFNCYFPLQSYGFQPTNGVGYQPYRVVVLSFELLHAPATVCGPKKSTNLVKNKCVNFNFNGLTGTGVLTESNKKFLPFQQFGRDIADTTDAVRDPQTLEILDITPCSFGGVSVITPGTNTSNQVAVLYQGVNCTEVPVAIHADQLTPTWRVYSTGSNVFQTRAGCLIGAEHVNNSYECDIPIGAGICASYQTQTNSRGSASSVASQSIIAYTMSLGAENSVAYSNNSIAIPTNFTISVTTEILPVSMTKTSVDCTMYICGDSTECSNLLLQYGSFCTQLNRALTGIAVEQDKNTQEVFAQVKQIYKTPPIKDFGGFNFSQILPDPSKPSKRSPIEDLLFNKVTLADAGFIKQYGDCLGDIAARDLICAQKFNGLTVLPPLLTDEMIAQYTSALLAGTITSGWTFGAGPALQIPFPMQMAYRFNGIGVTQNVLYENQKLIANQFNSAIGKIQDSLSSTPSALGKLQNVVNQNAQALNTLVKQLSSNFGAISSVLNDILSRLDPPEAEVQIDRLITGRLQSLQTYVTQQLIRAAEIRASANLAATKMSECVLGQSKRVDFCGKGYHLMSFPQSAPHGVVFLHVTYVPAQEKNFTTAPAICHDGKAHFPREGVFVSNGTHWFVTQRNFYEPQIITTDNTFVSGNCDVVIGIVNNTVYDPLQPELDSFKEELDKYFKNHTSPDVDLGDISGINASVVNIQKEIDRLNEVAKNLNESLIDLQELGKYGSGSGSGSGSGSGSGSMQWNSSTFHQALLDPRVRGLYFPAGGSSSGTVNPVPTTASPISSIFSRTGDPAPNMESTTSGFLGPLLALQAGFFLLTRILTIPQSLDSWWTSLNFLGGAPTCPGQNLQSPTSNHSPTSCPPICPGYRWMCLRRFIIFLFILLLCLIFLLVLLDYQGMLPVCPLLPGTSTTSTGPCKTCTIPAQGTSMFPSCCCTKPSDGNCTCIPIPSSWAFARFLWEWASVRFSWLSLLVPFVQWFVGLSPTVWLSVIWMMWYWGPSLYNILNPFLPLLPIFFCLWVYI

SEQ ID NO: 138 - protein, 1500 aa, synthetic construct
  REGION 1..1500: note = Recombinant Sequence
MFVFLVLLPLVSSQCVNLTTRTQLPPAYTNSFTRGVYYPDKVFRSSVLHSTQDLFLPFFSNVTWFHAISGTNGTKRFDNPVLPFNDGVYFASTEKSNIIRGWIFGTTLDSKTQSLLIVNNATNVVIKVCEFQFCNDPFLGVYHKNNKSWMESEFRVYSSANNCTFEYVSQPFLMDLEGKQGNFKNLREFVFKNIDGYFKIYSKHTPINLVRDLPQGFSALEPLVDLPIGINITRFQTLLALHRSYLTPGDSSSGWTAGAAAYYVGYLQPRTFLLKYNENGTITDAVDCALDPLSETKCTLKSFTVEKGIYQTSNFRVQPTESIVRFPNITNLCPFGEVFNATRFASVYAWNRKRISNCVADYSVLYNSASFSTFKCYGVSPTKLNDLCFTNVYADSFVIRGDEVRQIAPGQTGKIADYNYKLPDDFTGCVIAWNSNNLDSKVGGNYNYLYRLFRKSNLKPFERDISTEIYQAGSTPCNGVEGFNCYFPLQSYGFQPTYGVGYQPYRVVVLSFELLHAPATVCGPKKSTNLVKNKCVNFNFNGLTGTGVLTESNKKFLPFQQFGRDIDDTTDAVRDPQTLEILDITPCSFGGVSVITPGTNTSNQVAVLYQGVNCTEVPVAIHADQLTPTWRVYSTGSNVFQTRAGCLIGAEHVNNSYECDIPIGAGICASYQTQTNSHGSASSVASQSIIAYTMSLGAENSVAYSNNSIAIPINFTISVTTEILPVSMTKTSVDCTMYICGDSTECSNLLLQYGSFCTQLNRALTGIAVEQDKNTQEVFAQVKQIYKTPPIKDFGGFNFSQILPDPSKPSKRSPIEDLLFNKVTLADAGFIKQYGDCLGDIAARDLICAQKFNGLTVLPPLLTDEMIAQYTSALLAGTITSGWTFGAGPALQIPFPMQMAYRFNGIGVTQNVLYENQKLIANQFNSAIGKIQDSLSSTPSALGKLQDVVNQNAQALNTLVKQLSSNFGAISSVLNDILARLDPPEAEVQIDRLITGRLQSLQTYVTQQLIRAAEIRASANLAATKMSECVLGQSKRVDFCGKGYHLMSFPQSAPHGVVFLHVTYVPAQEKNFTTAPAICHDGKAHFPREGVFVSNGTHWFVTQRNFYEPQIITTHNTFVSGNCDVVIGIVNNTVYDPLQPELDSFKEELDKYFKNHTSPDVDLGDISGINASVVNIQKEIDRLNEVAKNLNESLIDLQELGKYGSGSGSGSGSGSGSGSMQWNSSTFHQALLDPRVRGLYFPAGGSSSGTVNPVPTTASPISSIFSRTGDPAPNMESTTSGFLGPLLALQAGFFLLTRILTIPQSLDSWWTSLNFLGGAPTCPGQNLQSPTSNHSPTSCPPICPGYRWMCLRRFIIFLFILLLCLIFLLVLLDYQGMLPVCPLLPGTSTTSTGPCKTCTIPAQGTSMFPSCCCTKPSDGNCTCIPIPSSWAFARFLWEWASVRFSWLSLLVPFVQWFVGLSPTVWLSVIWMMWYWGPSLYNILNPFLPLLPIFFCLWVYI

SEQ ID NO: 139 - protein, 1500 aa, synthetic construct
  REGION 1..1500: note = Recombinant Sequence
MFVFLVLLPLVSSQCVNLTTRTQLPPAYTNSFTRGVYYPDKVFRSSVLHSTQDLFLPFFSNVTWFHAISGTNGTKRFDNPVLPFNDGVYFASTEKSNIIRGWIFGTTLDSKTQSLLIVNNATNVVIKVCEFQFCNDPFLGVYHKNNKSWMESEFRVYSSANNCTFEYVSQPFLMDLEGKQGNFKNLREFVFKNIDGYFKIYSKHTPINLVRDLPQGFSALEPLVDLPIGINITRFQTLLALHRSYLTPGDSSSGWTAGAAAYYVGYLQPRTFLLKYNENGTITDAVDCALDPLSETKCTLKSFTVEKGIYQTSNFRVQPTESIVRFPNITNLCPFGEVFNATRFASVYAWNRKRISNCVADYSVLYNSASFSTFKCYGVSPTKLNDLCFTNVYADSFVIRGDEVRQIAPGQTGKIADYNYKLPDDFTGCVIAWNSNNLDSKVGGNYNYLYRLFRKSNLKPFERDISTEIYQAGSTPCNGVKGFNCYFPLQPYGFQPTYGVGYQPYRVVVLSFELLHAPATVCGPKKSTNLVKNKCVNFNFNGLTGTGVLTESNKKFLPFQQFGRDIDDTTDAVRDPQTLEILDITPCSFGGVSVITPGTNTSNQVAVLYQGVNCTEVPVAIHADQLTPTWRVYSTGSNVFQTRAGCLIGAEHVNNSYECDIPIGAGICASYQTQTNSHGSASSVASQSIIAYTMSLGAENSVAYSNNSIAIPINFTISVTTEILPVSMTKTSVDCTMYICGDSTECSNLLLQYGSFCTQLNRALTGIAVEQDKNTQEVFAQVKQIYKTPPIKDFGGFNFSQILPDPSKPSKRSPIEDLLFNKVTLADAGFIKQYGDCLGDIAARDLICAQKFNGLTVLPPLLTDEMIAQYTSALLAGTITSGWTFGAGPALQIPFPMQMAYRFNGIGVTQNVLYENQKLIANQFNSAIGKIQDSLSSTPSALGKLQDVVNQNAQALNTLVKQLSSNFGAISSVLNDILARLDPPEAEVQIDRLITGRLQSLQTYVTQQLIRAAEIRASANLAATKMSECVLGQSKRVDFCGKGYHLMSFPQSAPHGVVFLHVTYVPAQEKNFTTAPAICHDGKAHFPREGVFVSNGTHWFVTQRNFYEPQIITTHNTFVSGNCDVVIGIVNNTVYDPLQPELDSFKEELDKYFKNHTSPDVDLGDISGINASVVNIQKEIDRLNEVANNLNESLIDLQELGKYGSGSGSGSGSGSGSGSMQWNSSTFHQALLDPRVRGLYFPAGGSSSGTVNPVPTTASPISSIFSRTGDPAPNMESTTSGFLGPLLALQAGFFLLTRILTIPQSLDSWWTSLNFLGGAPTCPGQNLQSPTSNHSPTSCPPICPGYRWMCLRRFIIFLFILLLCLIFLLVLLDYQGMLPVCPLLPGTSTTSTGPCKTCTIPAQGTSMFPSCCCTKPSDGNCTCIPIPSSWAFARFLWEWASVRFSWLSLLVPFVQWFVGLSPTVWLSVIWMMWYWGPSLYNILNPFLPLLPIFFCLWVYI

SEQ ID NO: 140 - protein, 1500 aa, synthetic construct
  REGION 1..1500: note = Recombinant Sequence
MFVFLVLLPLVSSQCVNFTTRTQLPPAYTNSFTRGVYYPDKVFRSSVLHSTQDLFLPFFSNVTWFHAIHVSGTNGTKRFANPVLPFNDGVYFASTEKSNIIRGWIFGTTLDSKTQSLLIVNNATNVVIKVCEFQFCNDPFLGVYYHKNNKSWMESEFRVYSSANNCTFEYVSQPFLMDLEGKQGNFKNLREFVFKNIDGYFKIYSKHTPINLVRGLPQGFSALEPLVDLPIGINITRFQTLHRSYLTPGDSSSGWTAGAAAYYVGYLQPRTFLLKYNENGTITDAVDCALDPLSETKCTLKSFTVEKGIYQTSNFRVQPTESIVRFPNITNLCPFGEVFNATRFASVYAWNRKRISNCVADYSVLYNSASFSTFKCYGVSPTKLNDLCFTNVYADSFVIRGDEVRQIAPGQTGNIADYNYKLPDDFTGCVIAWNSNNLDSKVGGNYNYLYRLFRKSNLKPFERDISTEIYQAGSTPCNGVKGFNCYFPLQSYGFQPTYGVGYQPYRVVVLSFELLHAPATVCGPKKSTNLVKNKCVNFNFNGLTGTGVLTESNKKFLPFQQFGRDIADTTDAVRDPQTLEILDITPCSFGGVSVITPGTNTSNQVAVLYQGVNCTEVPVAIHADQLTPTWRVYSTGSNVFQTRAGCLIGAEHVNNSYECDIPIGAGICASYQTQTNSPGSASSVASQSIIAYTMSLGVENSVAYSNNSIAIPTNFTISVTTEILPVSMTKTSVDCTMYICGDSTECSNLLLQYGSFCTQLNRALTGIAVEQDKNTQEVFAQVKQIYKTPPIKDFGGFNFSQILPDPSKPSKRSPIEDLLFNKVTLADAGFIKQYGDCLGDIAARDLICAQKFNGLTVLPPLLTDEMIAQYTSALLAGTITSGWTFGAGPALQIPFPMQMAYRFNGIGVTQNVLYENQKLIANQFNSAIGKIQDSLSSTPSALGKLQDVVNQNAQALNTLVKQLSSNFGAISSVLNDILSRLDPPEAEVQIDRLITGRLQSLQTYVTQQLIRAAEIRASANLAATKMSECVLGQSKRVDFCGKGYHLMSFPQSAPHGVVFLHVTYVPAQEKNFTTAPAICHDGKAHFPREGVFVSNGTHWFVTQRNFYEPQIITTDNTFVSGNCDVVIGIVNNTVYDPLQPELDSFKEELDKYFKNHTSPDVDLGDISGINASVVNIQKEIDRLNEVAKNLNESLIDLQELGKYGSGSGSGSGSGSGSGSMQWNSSTFHQALLDPRVRGLYFPAGGSSSGTVNPVPTTASPISSIFSRTGDPAPNMESTTSGFLGPLLALQAGFFLLTRILTIPQSLDSWWTSLNFLGGAPTCPGQNLQSPTSNHSPTSCPPICPGYRWMCLRRFIIFLFILLLCLIFLLVLLDYQGMLPVCPLLPGTSTTSTGPCKTCTIPAQGTSMFPSCCCTKPSDGNCTCIPIPSSWAFARFLWEWASVRFSWLSLLVPFVQWFVGLSPTVWLSVIWMMWYWGPSLYNILNPFLPLLPIFFCLWVYI

SEQ ID NO: 141 - protein, 1503 aa, synthetic construct
  REGION 1..1503: note = Recombinant Sequence
MFVFLVLLPLVSSQCVNFTNRTQLPSAYTNSFTRGVYYPDKVFRSSVLHSTQDLFLPFFSNVTWFHAIHVSGTNGTKRFDNPVLPFNDGVYFASTEKSNIIRGWIFGTTLDSKTQSLLIVNNATNVVIKVCEFQFCNYPFLGVYYHKNNKSWMESEFRVYSSANNCTFEYVSQPFLMDLEGKQGNFKNLSEFVFKNIDGYFKIYSKHTPINLVRDLPQGFSALEPLVDLPIGINITRFQTLLALHRSYLTPGDSSSGWTAGAAAYYVGYLQPRTFLLKYNENGTITDAVDCALDPLSETKCTLKSFTVEKGIYQTSNFRVQPTESIVRFPNITNLCPFGEVFNATRFASVYAWNRKRISNCVADYSVLYNSASFSTFKCYGVSPTKLNDLCFTNVYADSFVIRGDEVRQIAPGQTGTIADYNYKLPDDFTGCVIAWNSNNLDSKVGGNYNYLYRLFRKSNLKPFERDISTEIYQAGSTPCNGVKGFNCYFPLQSYGFQPTYGVGYQPYRVVVLSFELLHAPATVCGPKKSTNLVKNKCVNFNFNGLTGTGVLTESNKKFLPFQQFGRDIADTTDAVRDPQTLEILDITPCSFGGVSVITPGTNTSNQVAVLYQGVNCTEVPVAIHADQLTPTWRVYSTGSNVFQTRAGCLIGAEYVNNSYECDIPIGAGICASYQTQTNSPGSASSVASQSIIAYTMSLGAENSVAYSNNSIAIPTNFTISVTTEILPVSMTKTSVDCTMYICGDSTECSNLLLQYGSFCTQLNRALTGIAVEQDKNTQEVFAQVKQIYKTPPIKDFGGFNFSQILPDPSKPSKRSPIEDLLFNKVTLADAGFIKQYGDCLGDIAARDLICAQKFNGLTVLPPLLTDEMIAQYTSALLAGTITSGWTFGAGPALQIPFPMQMAYRFNGIGVTQNVLYENQKLIANQFNSAIGKIQDSLSSTPSALGKLQDVVNQNAQALNTLVKQLSSNFGAISSVLNDILSRLDPPEAEVQIDRLITGRLQSLQTYVTQQLIRAAEIRASANLAAIKMSECVLGQSKRVDFCGKGYHLMSFPQSAPHGVVFLHVTYVPAQEKNFTTAPAICHDGKAHFPREGVFVSNGTHWFVTQRNFYEPQIITTDNTFVSGNCDVVIGIVNNTVYDPLQPELDSFKEELDKYFKNHTSPDVDLGDISGINASFVNIQKEIDRLNEVAKNLNESLIDLQELGKYGSGSGSGSGSGSGSGSMQWNSSTFHQALLDPRVRGLYFPAGGSSSGTVNPVPTTASPISSIFSRTGDPAPNMESTTSGFLGPLLALQAGFFLLTRILTIPQSLDSWWTSLNFLGGAPTCPGQNLQSPTSNHSPTSCPPICPGYRWMCLRRFIIFLFILLLCLIFLLVLLDYQGMLPVCPLLPGTSTTSTGPCKTCTIPAQGTSMFPSCCCTKPSDGNCTCIPIPSSWAFARFLWEWASVRFSWLSLLVPFVQWFVGLSPTVWLSVIWMMWYWGPSLYNILNPFLPLLPIFFCLWVYI

SEQ ID NO: 142 - protein, 1503 aa, synthetic construct
  REGION 1..1503: note = Recombinant Sequence
MFVFLVLLPLVSSQCVNLTTRTQLPPAYTNSFTRGVYYPDKVFRSSVLHSTQDLFLPFFSNVTWFHAIHVSGTNGTKRFDNPVLPFNDGVYFASIEKSNIIRGWIFGTTLDSKTQSLLIVNNATNVVIKVCEFQFCNDPFLDVYYHKNNKSWMKSEFRVYSSANNCTFEYVSQPFLMDLEGKQGNFKNLREFVFKNIDGYFKIYSKHTPINLVRDLPQGFSALEPLVDLPIGINITRFQTLLALHRSYLTPGDSSSGWTAGAAAYYVGYLQPRTFLLKYNENGTITDAVDCALDPLSETKCTLKSFTVEKGIYQTSNFRVQPTESIVRFPNITNLCPFGEVFNATRFASVYAWNRKRISNCVADYSVLYNSASFSTFKCYGVSPTKLNDLCFTNVYADSFVIRGDEVRQIAPGQTGKIADYNYKLPDDFTGCVIAWNSNNLDSKVGGNYNYRYRLFRKSNLKPFERDISTEIYQAGSTPCNGVQGFNCYFPLQSYGFQPTNGVGYQPYRVVVLSFELLHAPATVCGPKKSTNLVKNKCVNFNFNGLTGTGVLTESNKKFLPFQQFGRDIADTTDAVRDPQTLEILDITPCSFGGVSVITPGTNTSNQVAVLYQGVNCTEVPVAIHADQLTPTWRVYSTGSNVFQTRAGCLIGAEHVNNSYECDIPIGAGICASYQTQTNSRGSASSVASQSIIAYTMSLGAENSVAYSNNSIAIPTNFTISVTTEILPVSMTKTSVDCTMYICGDSTECSNLLLQYGSFCTQLNRALTGIAVEQDKNTQEVFAQVKQIYKTPPIKDFGGFNFSQILPDPSKPSKRSPIEDLLFNKVTLADAGFIKQYGDCLGDIAARDLICAQKFNGLTVLPPLLTDEMIAQYTSALLAGTITSGWTFGAGPALQIPFPMQMAYRFNGIGVTQNVLYENQKLIANQFNSAIGKIQDSLSSTPSALGKLQDVVNQNAQALNTLVKQLSSNFGAISSVLNDILSRLDPPEAEVQIDRLITGRLQSLQTYVTQQLIRAAEIRASANLAATKMSECVLGQSKRVDFCGKGYHLMSFPQSAPHGVVFLHVTYVPAHEKNFTTAPAICHDGKAHFPREGVFVSNGTHWFVTQRNFYEPQIITTDNTFVSGNCDVVIGIVNNTVYDPLQPELDSFKEELDKYFKNHTSPDVDLGDISGINASVVNIQKEIDRLNEVAKNLNESLIDLQELGKYGSGSGSGSGSGSGSGSMQWNSSTFHQALLDPRVRGLYFPAGGSSSGTVNPVPTTASPISSIFSRTGDPAPNMESTTSGFLGPLLALQAGFFLLTRILTIPQSLDSWWTSLNFLGGAPTCPGQNLQSPTSNHSPTSCPPICPGYRWMCLRRFIIFLFILLLCLIFLLVLLDYQGMLPVCPLLPGTSTTSTGPCKTCTIPAQGTSMFPSCCCTKPSDGNCTCIPIPSSWAFARFLWEWASVRFSWLSLLVPFVQWFVGLSPTVWLSVIWMMWYWGPSLYNILNPFLPLLPIFFCLWVYI

SEQ ID NO: 143 - protein, 1496 aa, synthetic construct
  REGION 1..1496: note = Recombinant Sequence
MFVFLVLLPLVSSQCVNLTTRTQLPPAYTNSFTRGVYYPDKVFRSSVLHSTQDLFLPFFSNVTWFHAIHVSGTNVIKRFDNPVLPFNDGVYFASTEKSNIIRGWIFGTTLDSKTQSLLIVNNATNVVIKVCEFQFCNDPFLGVYYHKNNKSWMESEFRVYSSANNCTFEYVSQPFLMDLEGKQGNFKNLREFVFKNIDGYFKIYSKHTPINLVRDLPQGFSALEPLVDLPIGINITRFQTLLALHNSSSGWTAGAAAYYVGYLQPRTFLLKYNENGTITDAVDCALDPLSETKCTLKSFTVEKGIYQTSNFRVQPTESIVRFPNITNLCPFGEVFNATRFASVYAWNRKRISNCVADYSVLYNSASFSTFKCYGVSPTKLNDLCFTNVYADSFVIRGDEVRQIAPGQTGKIADYNYKLPDDFTGCVIAWNSNNLDSKVGGNYNYQYRLFRKSNLKPFERDISTEIYQAGSTPCNGVEGFNCYSPLQSYGFQPTNGVGYQPYRVVVLSFELLHAPATVCGPKKSTNLVKNKCVNFNFNGLTGTGVLTESNKKFLPFQQFGRDIADTTDAVRDPQTLEILDITPCSFGGVSVITPGTNTSNQVAVLYQGVNCTEVPVAIHADQLTPTWRVYSTGSNVFQTRAGCLIGAEHVNNSYECDIPIGAGICASYQTQTNSPGSASSVASQSIIAYTMSLGAENSVAYSNNSIAIPTNFTISVTTEILPVSMTKTSVDCTMYICGDSTECSNLLLQYGSFCTQLNRALTGIAVEQDKNTQEVFAQVKQIYKTPPIKDFGGFNFSQILPDPSKPSKRSPIEDLLFNKVTLADAGFIKQYGDCLGDIAARDLICAQKFNGLNVLPPLLTDEMIAQYTSALLAGTITSGWTFGAGPALQIPFPMQMAYRFNGIGVTQNVLYENQKLIANQFNSAIGKIQDSLSSTPSALGKLQDVVNQNAQALNTLVKQLSSNFGAISSVLNDILSRLDPPEAEVQIDRLITGRLQSLQTYVTQQLIRAAEIRASANLAATKMSECVLGQSKRVDFCGKGYHLMSFPQSAPHGVVFLHVTYVPAQEKNFTTAPAICHDGKAHFPREGVFVSNGTHWFVTQRNFYEPQIITTDNTFVSGNCDVVIGIVNNTVYDPLQPELDSFKEELDKYFKNHTSPDVDLGDISGINASVVNIQKEIDRLNEVAKNLNESLIDLQELGKYGSGSGSGSGSGSGSGSMQWNSSTFHQALLDPRVRGLYFPAGGSSSGTVNPVPTTASPISSIFSRTGDPAPNMESTTSGFLGPLLALQAGFFLLTRILTIPQSLDSWWTSLNFLGGAPTCPGQNLQSPTSNHSPTSCPPICPGYRWMCLRRFIIFLFILLLCLIFLLVLLDYQGMLPVCPLLPGTSTTSTGPCKTCTIPAQGTSMFPSCCCTKPSDGNCTCIPIPSSWAFARFLWEWASVRFSWLSLLVPFVQWFVGLSPTVWLSVIWMMWYWGPSLYNILNPFLPLLPIFFCLWVYI

SEQ ID NO: 144 - protein, 1495 aa, synthetic construct
  REGION 1..1495: note = Recombinant Sequence
MFVFLVLLPLVSSQCVNLTTRTQLPPAYTNSFTRGVYYPDKVFRSSVLHSTQDLFLPFFSNVTWFHAIHVSGTNVIKRFDNPVLPFNDGVYFASTEKSNIIRGWIFGTTLDSKTQSLLIVNNATNVVIKVCEFQFCNDPFLGVYYHKNNKSWMESEFRVYSSANNCTFEYVSQPFLMDLEGKQGNFKNLREFVFKNIDGYFKIYSKHTPINLVRDLPQGFSALEPLVDLPIGINITRFQTLLALHSSSGWTAGAAAYYVGYLQPRTFLLKYNENGTITDAVDCALDPLSETKCTLKSFTVEKGIYQTSNFRVQPTESIVRFPNITNLCPFGEVFNATRFASVYAWNRKRISNCVADYSVLYNSASFSTFKCYGVSPTKLNDLCFTNVYADSFVIRGDEVRQIAPGQTGKIADYNYKLPDDFTGCVIAWNSNNLDSKVGGNYNYQYRLFRKSNLKPFERDISTEIYQAGSTPCNGVEGFNCYSPLQSYGFQPTNGVGYQPYRVVVLSFELLHAPATVCGPKKSTNLVKNKCVNFNFNGLTGTGVLTESNKKFLPFQQFGRDIADTTDAVRDPQTLEILDITPCSFGGVSVITPGTNTSNQVAVLYQGVNCTEVPVAIHADQLTPTWRVYSTGSNVFQTRAGCLIGAEHVNNSYECDIPIGAGICASYQTQTNSPGSASSVASQSIIAYTMSLGAENSVAYSNNSIAIPTNFTISVTTEILPVSMTKTSVDCTMYICGDSTECSNLLLQYGSFCTQLNRALTGIAVEQDKNTQEVFAQVKQIYKTPPIKDFGGFNFSQILPDPSKPSKRSPIEDLLFNKVTLADAGFIKQYGDCLGDIAARDLICAQKFNGLNVLPPLLTDEMIAQYTSALLAGTITSGWTFGAGPALQIPFPMQMAYRFNGIGVTQNVLYENQKLIANQFNSAIGKIQDSLSSTPSALGKLQDVVNQNAQALNTLVKQLSSNFGAISSVLNDILSRLDPPEAEVQIDRLITGRLQSLQTYVTQQLIRAAEIRASANLAATKMSECVLGQSKRVDFCGKGYHLMSFPQSAPHGVVFLHVTYVPAQEKNFTTAPAICHDGKAHFPREGVFVSNGTHWFVTQRNFYEPQIITTDNTFVSGNCDVVIGIVNNTVYDPLQPELDSFKEELDKYFKNHTSPDVDLGDISGINASVVNIQKEIDRLNEVAKNLNESLIDLQELGKYGSGSGSGSGSGSGSGSMQWNSSTFHQALLDPRVRGLYFPAGGSSSGTVNPVPTTASPISSIFSRTGDPAPNMESTTSGFLGPLLALQAGFFLLTRILTIPQSLDSWWTSLNFLGGAPTCPGQNLQSPTSNHSPTSCPPICPGYRWMCLRRFIIFLFILLLCLIFLLVLLDYQGMLPVCPLLPGTSTTSTGPCKTCTIPAQGTSMFPSCCCTKPSDGNCTCIPIPSSWAFARFLWEWASVRFSWLSLLVPFVQWFVGLSPTVWLSVIWMMWYWGPSLYNILNPFLPLLPIFFCLWVYI

SEQ ID NO: 145 - protein, 1503 aa, synthetic construct
  REGION 1..1503: note = Recombinant Sequence
MFVFLVLLPLVSSQCVNLTTRTQLPPAYTNSFTRGVYYPDKVFRSSVLHSTQDLFLPFFSNVTWFHAIHVSGTNGTKRFDNPVLPFNDGVYFASTEKSNIIRGWIFGTTLDSKTQSLLIVNNATNVVIKVCEFQFCNDPFLGVYYHKNNKSLMESEFRVYSSANNCTFEYVSQPFLMDLEGKQGNFKNLREFVFKNIDGYFKIYSKHTPINLVRDLPQGFSALEPLVDLPIGINITRFQTLLALHRSYLTPGDSSSGWTAGAAAYYVGYLQPRTFLLKYNENGTITDAVDCALDPLSETKCTLKSFTVEKGIYQTSNFRVQPTESIVRFPNITNLCPFGEVFNATRFASVYAWNRKRISNCVADYSVLYNSASFSTFKCYGVSPTKLNDLCFTNVYADSFVIRGDEVRQIAPGQTGKIADYNYKLPDDFTGCVIAWNSNNLDSKVGGNYNYLYRLFRKSNLKPFERDISTEIYQAGSTPCNGVKGFNCYFPLQSYGFQPTNGVGYQPYRVVVLSFELLHAPATVCGPKKSTNLVKNKCVNFNFNGLTGTGVLTESNKKFLPFQQFGRDIADTTDAVRDPQTLEILDITPCSFGGVSVITPGTNTSNQVAVLYQGVNCTEVPVAIHADQLTPTWRVYSTGSNVFQTRAGCLIGAEHVNNSYECDIPIGAGICASYQTQTNSPGSASSVASQSIIAYTMSLGAENSVAYSNNSIAIPTNFTISVTTEILPVSMTKTSVDCTMYICGDSTECSNLLLQYGSFCTQLNRALTVIAVEQDKNTQEVFAQVKQIYKTPPIKDFGGFNFSQILPDPSKPSKRSPIEDLLFNKVTLADAGFIKQYGDCLGDIAARDLICAQKFNGLTVLPPLLTDEMIAQYTSALLAGTITSGWTFGAGPALQIPFPMQMAYRFNGIGVTQNVLYENQKLIANQFNSAIGKIQDSLSSTPSALGKLQDVVNQNAQALNTLVKQLSSNFGAISSVLNDILSRLDPPEAEVQIDRLITGRLQSLQTYVTQQLIRAAEIRASANLAATKMSECVLGQSKRVDFCGKGYHLMSFPQSAPHGVVFLHVTYVPAQEKNFTTAPAICHDGKAHFPREGVFVSNGTHWFVTQRNFYEPQIITTDNTFVSGNCDVVIGIVNNTVYDPLQPELDSFKEELDKYFKNHTSPDVDLGDISGINASVVNIQKEIDRLNEVAKNLNESLIDLQELGKYGSGSGSGSGSGSGSGSMQWNSSTFHQALLDPRVRGLYFPAGGSSSGTVNPVPTTASPISSIFSRTGDPAPNMESTTSGFLGPLLALQAGFFLLTRILTIPQSLDSWWTSLNFLGGAPTCPGQNLQSPTSNHSPTSCPPICPGYRWMCLRRFIIFLFILLLCLIFLLVLLDYQGMLPVCPLLPGTSTTSTGPCKTCTIPAQGTSMFPSCCCTKPSDGNCTCIPIPSSWAFARFLWEWASVRFSWLSLLVPFVQWFVGLSPTVWLSVIWMMWYWGPSLYNILNPFLPLLPIFFCLWVYI

SEQ ID NO: 146 - protein, 1503 aa, synthetic construct
  REGION 1..1503: note = Recombinant Sequence
MFVFLVLLPLVSSQCVNLTTRTQLPPAYTNSFTRGVYYPDKVFRSSVLHSTQDLFLPFFSNVTWFHAIHVSGTNGTKRFDNPVLPFNDGVYFASTEKSNIIRGWIFGTTLDSKTQSLLIVNNATNVVIKVCEFQFCNDPFLGVYYHKNNKSWMESEFRVYSSANNCTFEYVSQPFLMDLEGKQGNFKNLREFVFKNIDGYFKIYSKHTPINLVRDLPQGFSALEPLVDLPIGINITRFQTLLALHRSYLTPGDSSSGWTAGAAAYYVGYLQPRTFLLKYNENGTITDAVDCALDPLSETKCTLKSFTVEKGIYQTSNFRVQPTESIVRFPNITNLCPFGEVFNATRFASVYAWNRKRISNCVADYSVLYNSASFSTFKCYGVSPTKLNDLCFTNVYADSFVIRGDEVRQIAPGQTGKIADYNYKLPDDFTGCVIAWNSNNLDSKVGGNYNYLYRLFRKSNLKPFERDISTEIYQAGSKPCNGVEGFNCYFPLQSYGFQPTNGVGYQPYRVVVLSFELLHAPATVCGPKKSTNLVKNKCVNFNFNGLTGTGVLTESNKKFLPFQQFGRDIADTTDAVRDPQTLEILDITPCSFGGVSVITPGTNTSNQVAVLYQGVNCTEVPVAIHADQLTPTWRVYSTGSNVFQTRAGCLIGAEHVNNSYECDIPIGAGICASYQTQTNSHGSASSVASQSIIAYTMSLGAENSVAYSNNSIAIPTNFTISVTTEILPVSMAKTSVDCTMYICGDSTECSNLLLQYGSFCTQLNRALTGIAVEQDKNTQEVFAQVKQIYKTPPIKDFGGFNFSQILPDPSKPSKRSPIEDLLFNKVTLADAGFIKQYGDCLGDIAARDLICAQKFNGLTVLPPLLTDEMIAQYTSALLAGTITSGWTFGAGPALQIPFPMQMAYRFNGIGVTQNVLYENQKLIANQFNSAIGKIQDSLSSTPSALGKLQDVVNQNAQALNTLVKQLSSNFGAISSVLNDILSRLDPPEAEVQIDRLITGRLQSLQTYVTQQLIRAAEIRASANLAATKMSECVLGQSKRVDFCGKGYHLMSFPQSAPHGVVFLHVTYVPAQEKNFTTAPAICHDGKAHFPREGVFVSNGTHWFVTQRNFYEPQIITTDNTFVSGNCDVVIGIVNNTVYDPLQPELDSFKEELDKYFKNHTSPDVDLGDISGINASVVNIQKEIDRLNEVAKNLNESLIDLQELGKYGSGSGSGSGSGSGSGSMQWNSSTFHQALLDPRVRGLYFPAGGSSSGTVNPVPTTASPISSIFSRTGDPAPNMESTTSGFLGPLLALQAGFFLLTRILTIPQSLDSWWTSLNFLGGAPTCPGQNLQSPTSNHSPTSCPPICPGYRWMCLRRFIIFLFILLLCLIFLLVLLDYQGMLPVCPLLPGTSTTSTGPCKTCTIPAQGTSMFPSCCCTKPSDGNCTCIPIPSSWAFARFLWEWASVRFSWLSLLVPFVQWFVGLSPTVWLSVIWMMWYWGPSLYNILNPFLPLLPIFFCLWVYI

SEQ ID NO: 147 - protein, 1500 aa, synthetic construct
  REGION 1..1500: note = Recombinant Sequence
MFVFLVLLPLVSSQCVNLTTRTQLPPAYTNSFTRGVYYPDKVFRSSVLHSTRDLFLPFFSNVTWFHVISGTNGTKRFDNPVLPFNDGVYFASTEKSNIIRGWIFGTTLDSKTQSLLIVNNATNVVIKVCEFQFCNDPFLGVYHKNNKSWMESEFRVYSSANNCTFEYVSQPFLMDLEGKQGNFKNLREFVFKNIDGYFKIYSKHTPINLVRDLPQGFSALEPLVDLPIGINITRFQTLLALHRSYLTPGDSSSGWTAGAAAYYVGYLQPRTFLLKYNENGTITDAVDCALDPLSETKCTLKSFTVEKGIYQTSNFRVQPTESIVRFPNITNLCPFGEVFNATRFASVYAWNRKRISNCVADYSVLYNSASFSTFKCYGVSPTKLNDLCFTNVYADSFVIRGDEVRQIAPGQTGKIADYNYKLPDDFTGCVIAWNSNNLDSKVGGNYNYLYRLFRKSNLKPFERDISTEIYQAGSTPCNGVKGFNCYFPLQSYGFQPTNGVGYQPYRVVVLSFELLHAPATVCGPKKSTNLVKNKCVNFNFNGLTGTGVLTESNKKFLPFQQFGRDIADTTDAVRDPQTLEILDITPCSFGGVSVITPGTNTSNQVAVLYQGVNCTEVPVAIHADQLTPTWRVYSTGSNVFQTRAGCLIGAEHVNNSYECDIPIGAGICASYQTHTNSPGSASSVASQSIIAYTMSLGAENSVAYSNNSIAIPTNFTISVTTEILPVSMTKTSVDCTMYICGDSTECSNLLLQYGSFCTQLNRALTGIAVEQDKNTQEVFAQVKQIYKTPPIKDFGGFNFSQILPDPSKPSKRSPIEDLLFNKVTLADAGFIKQYGDCLGDIAARDLICAQKFNGLTVLPPLLTDEMIAQYTSALLAGTITSGWTLGAGPALQIPFPMQMAYRFNGIGVTQNVLYENQKLIANQFNSAIGKIQDSLSSTPSALGKLQDVVNQNAQALNTLVKQLSSNFGAISSVLNDILSRLDPPEAEVQIDRLITGRLQSLQTYVTQQLIRAAEIRASANLAATKMSECVLGQSKRVDFCGKGYHLMSFPQSAPHGVVFLHVTYVPAQEKNFTTAPAICHDGKAHFPREGVFVSNGTHWFVTQRNFYEPQIITTDNTFVSGNCDVVIGIVNNTVYDPLQPELDSFKEELDKYFKNHTSPDVDLGDISGINASVVNIQKEIDRLNEVAKNLNESLIDLQELGKYGSGSGSGSGSGSGSGSMQWNSSTFHQALLDPRVRGLYFPAGGSSSGTVNPVPTTASPISSIFSRTGDPAPNMESTTSGFLGPLLALQAGFFLLTRILTIPQSLDSWWTSLNFLGGAPTCPGQNLQSPTSNHSPTSCPPICPGYRWMCLRRFIIFLFILLLCLIFLLVLLDYQGMLPVCPLLPGTSTTSTGPCKTCTIPAQGTSMFPSCCCTKPSDGNCTCIPIPSSWAFARFLWEWASVRFSWLSLLVPFVQWFVGLSPTVWLSVIWMMWYWGPSLYNILNPFLPLLPIFFCLWVYI

SEQ ID NO: 148 - protein, 1503 aa, synthetic construct
  REGION 1..1503: note = Recombinant Sequence
MFVFFVLLPLVSSQCVNLTTRTQLPPAYTNSFTRGVYYPDKVFRSSVLHSTQDLFLPFFSNVTWFHAIHVSGTNGTKRFDNPVLPFNDGVYFASIEKSNIIRGWIFGTTLDSKTQSLLIVNNATNVVIKVCEFQFCNDPFLGVYYHKNNKSWMESEFRVYSSANNCTFEYVSQPFLMDLEGKQGNFKNLREFVFKNIDGYFKIYSKHTPINLVRDLPQGFSALEPLVDLPIGINITRFQTLLALHRSYLTPGGSSSGWTAGAAAYYVGYLQPRTFLLKYNENGTITDAVDCALDPLSETKCTLKSFTVEKGIYQTSNFRVQPTESIVRFPNITNLCPFGEVFNATRFASVYAWNRKRISNCVADYSVLYNSASFSTFKCYGVSPTKLNDLCFTNVYADSFVIRGDEVRQIAPGQTGKIADYNYKLPDDFTGCVIAWNSNNLDSKVGGNYNYLYRLFRKSNLKPFERDISTEIYQAGSTPCNGVKGFNCYFPLQSYGFQPTNGVGYQPYRVVVLSFELLHAPATVCGPKKSTNLVKNKCVNFNFNGLTGTGVLTESNKKFLPFQQFGRDIADTTDAVRDPQTLEILDITPCSFGGVSVITPGTNTSNQVAVLYQGVNCTEVPVAIHADQLTPTWRVYSTGSNVFQTRAGCLIGAEHVNNSYECDIPIGAGICASYQTQTNSPGSASSVASQSIIAYTMSLGVENSVAYSNNSIAIPTNFTISVTTEILPVSMTKTSVDCTMYICGDSTECSNLLLQYGSFCTQLNRALTGIAVEQDKNTQEVFAQVKQIYKTPPIKDFGGFNFSQILPDPSKPSKRSPIEDLLFNKVTLADAGFIKQYGDCLGDIAARDLICAQKFNGLTVLPPLLTDEMIAQYTSALLAGTITSGWTFGAGPALQIPFPMQMAYRFNGIGVTQNVLYENQKLIANQFNSAIGKIQDSLSSTPSALGKLQDVVNQNAQALNTLVKQLSSNFGAISSVLNDILSRLDPPEAEVQIDRLITGRLQSLQTYVTQQLIRAAEIRASANLAATKMSECVLGQSKRVDFCGKGYHLMSFPQSAPHGVVFLHVTYVPAQEKNFTTAPAICHDGKAHFPREGVFVSNGTHWFVTQRNFYEPQIITTDNTFVSGNCDVVIGIVNNTVYDPLQPELDSFKEELDKYFKNHTSPDVDLGDISGINASVVNIQKEIDRLNEVAKNLNESLIDLQELGKYGSGSGSGSGSGSGSGSMQWNSSTFHQALLDPRVRGLYFPAGGSSSGTVNPVPTTASPISSIFSRTGDPAPNMESTTSGFLGPLLALQAGFFLLTRILTIPQSLDSWWTSLNFLGGAPTCPGQNLQSPTSNHSPTSCPPICPGYRWMCLRRFIIFLFILLLCLIFLLVLLDYQGMLPVCPLLPGTSTTSTGPCKTCTIPAQGTSMFPSCCCTKPSDGNCTCIPIPSSWAFARFLWEWASVRFSWLSLLVPFVQWFVGLSPTVWLSVIWMMWYWGPSLYNILNPFLPLLPIFFCLWVYI

SEQ ID NO: 149 - protein, 1503 aa, synthetic construct
  REGION 1..1503: note = Recombinant Sequence
MFVFLVLLPLVSIQCVNLTTRTQLPPAYTNSFTRGVYYPDKVFRSSVLHSTQDLFLPFFSNVTWFHAIHVSGTNGTKRFDNPVLPFNDGVYFASTEKSNIIRGWIFGTTLDSKTQSLLIVNNATNVVIKVCEFQFCNDPFLGVYYHKNNKSCMESEFRVYSSANNCTFEYVSQPFLMDLEGKQGNFKNLREFVFKNIDGYFKIYSKHTPINLVRDLPQGFSALEPLVDLPIGINITRFQTLLALHRSYLTPGDSSSGWTAGAAAYYVGYLQPRTFLLKYNENGTITDAVDCALDPLSETKCTLKSFTVEKGIYQTSNFRVQPTESIVRFPNITNLCPFGEVFNATRFASVYAWNRKRISNCVADYSVLYNSASFSTFKCYGVSPTKLNDLCFTNVYADSFVIRGDEVRQIAPGQTGKIADYNYKLPDDFTGCVIAWNSNNLDSKVGGNYNYRYRLFRKSNLKPFERDISTEIYQAGSTPCNGVEGFNCYFPLQSYGFQPTNGVGYQPYRVVVLSFELLHAPATVCGPKKSTNLVKNKCVNFNFNGLTGTGVLTESNKKFLPFQQFGRDIADTTDAVRDPQTLEILDITPCSFGGVSVITPGTNTSNQVAVLYQGVNCTEVPVAIHADQLTPTWRVYSTGSNVFQTRAGCLIGAEHVNNSYECDIPIGAGICASYQTQTNSPGSASSVASQSIIAYTMSLGAENSVAYSNNSIAIPTNFTISVTTEILPVSMTKTSVDCTMYICGDSTECSNLLLQYGSFCTQLNRALTGIAVEQDKNTQEVFAQVKQIYKTPPIKDFGGFNFSQILPDPSKPSKRSPIEDLLFNKVTLADAGFIKQYGDCLGDIAARDLICAQKFNGLTVLPPLLTDEMIAQYTSALLAGTITSGWTFGAGPALQIPFPMQMAYRFNGIGVTQNVLYENQKLIANQFNSAIGKIQDSLSSTPSALGKLQDVVNQNAQALNTLVKQLSSNFGAISSVLNDILSRLDPPEAEVQIDRLITGRLQSLQTYVTQQLIRAAEIRASANLAATKMSECVLGQSKRVDFCGKGYHLMSFPQSAPHGVVFLHVTYVPAQEKNFTTAPAICHDGKAHFPREGVFVSNGTHWFVTQRNFYEPQIITTDNTFVSGNCDVVIGIVNNTVYDPLQPELDSFKEELDKYFKNHTSPDVDLGDISGINASVVNIQKEIDRLNEVAKNLNESLIDLQELGKYGSGSGSGSGSGSGSGSMQWNSSTFHQALLDPRVRGLYFPAGGSSSGTVNPVPTTASPISSIFSRTGDPAPNMESTTSGFLGPLLALQAGFFLLTRILTIPQSLDSWWTSLNFLGGAPTCPGQNLQSPTSNHSPTSCPPICPGYRWMCLRRFIIFLFILLLCLIFLLVLLDYQGMLPVCPLLPGTSTTSTGPCKTCTIPAQGTSMFPSCCCTKPSDGNCTCIPIPSSWAFARFLWEWASVRFSWLSLLVPFVQWFVGLSPTVWLSVIWMMWYWGPSLYNILNPFLPLLPIFFCLWVYI

SEQ ID NO: 150 - protein, 1502 aa, synthetic construct
  REGION 1..1502: note = Recombinant Sequence
MFVFLVLLPLVSSQCVNLTTRTQLPPAYTNSFTRGVYYPDKVFRSSVLHSTQDLFLPFFSNVTWFHAIHVSGTNGTKRFGNPVLPFNDGVYFASTEKSNIIRGWIFGTTLDSKTQSLLIVNNATNVVIKVCEFQFCNDPFLGVYHKNNKSWMESESRVYSSANNCTFEYVSQPFLMDLEGKQGNFKNLREFVFKNIDGYFKIYSKHTPINLVRDLPQGFSALEPLVDLPIGINITRFQTLLALHRSYLTPGDSSSGWTAGAAAYYVGYLQPRTFLLKYNENGTITDAVDCALDPLSETKCTLKSFTVEKGIYQTSNFRVQPTESIVRFPNITNLCPFGEVFNATRFASVYAWNRKRISNCVADYSVLYNSASFSTFKCYGVSPTKLNDLCFTNVYADSFVIRGDEVRQIAPGQTGKIADYNYKLPDDFTGCVIAWNSNNLDSKVGGNYNYRYRLFRKSNLKPFERDISTEIYQAGSTPCNGVEGFNCYFPLQSYGFQPTNGVGYQPYRVVVLSFELLHAPATVCGPKKSTNLVKNKCVNFNFNGLTGTGVLTESNKKFLPFQQFGRDIADTTDAVRDPQTLEILDITPCSFGGVSVITPGTNTSNQVAVLYQGVNCTEVPVAIHADQLTPTWRVYSTGSNVFQTRAGCLIGAEHVNNSYECDIPIGAGICASYQTQTNSPGSASSVASQSIIAYTMSLGAENSVAYSNNSIAIPTNFTISVTTEILPVSMTKTSVDCTMYICGDSTECSNLLLQYGSFCTQLNRALTGIAVEQDKNTQEVFAQVKQIYKTPPIKDFGGFNFSQILPDPSKPSKRSPIEDLLFNKVTLADAGFIKQYGDCLGDIAARDLICAQKFNGLNVLPPLLTDEMIAQYTSALLAGTITSGWTFGAGPALQIPFPMQMAYRFNGIGVTQNVLYENQKLIANQFNSAIGKIQDSLSSTPSALGKLQHVVNQNAQALNTLVKQLSSNFGAISSVLNDILSRLDPPEAEVQIDRLITGRLQSLQTYVTQQLIRAAEIRASANLAATKMSECVLGQSKRVDFCGKGYHLMSFPQSAPHGVVFLHVTYVPAQEKNFTTAPAICHDGKAHFPREGVFVSNGTHWFVTQRNFYEPQIITTDNTFVSGNCDVVIGIVNNTVYDPLQPELDSFKEELDKYFKNHTSPDVDLGDISGINASVVNIQKEIDRLNEVAKNLNESLIDLQELGKYGSGSGSGSGSGSGSGSMQWNSSTFHQALLDPRVRGLYFPAGGSSSGTVNPVPTTASPISSIFSRTGDPAPNMESTTSGFLGPLLALQAGFFLLTRILTIPQSLDSWWTSLNFLGGAPTCPGQNLQSPTSNHSPTSCPPICPGYRWMCLRRFIIFLFILLLCLIFLLVLLDYQGMLPVCPLLPGTSTTSTGPCKTCTIPAQGTSMFPSCCCTKPSDGNCTCIPIPSSWAFARFLWEWASVRFSWLSLLVPFVQWFVGLSPTVWLSVIWMMWYWGPSLYNILNPFLPLLPIFFCLWVYI

SEQ ID NO: 151 - protein, 1503 aa, synthetic construct
  REGION 1..1503: note = Recombinant Sequence
MFVFLVLLPLVSSQCVNLTTRTQLPPAYTNSFTRGVYYPDKVFRSSVLHSTQDLFLPFFSNVTWFHAIHVSGTNGTKRFDNPVLPFNDGVYFASTEKSNIIRGWIFGTTLDSKTQSLLIVNNATNVVIKVCEFQFCNDPFLGVYYHKNNKSWMESEFRVYSSANNCTFEYVSQPFLMDLEGKQGNFKNLREFVFKNIDGYFKIYSKHTPINLVRDLPQGFSALEPLVDLPIGINITRFQTLLALHRSYLTPGDSSSGWTAGAAAYYVGYLQPRTFLLKYNENGTITDAVDCALDPLSETKCTLKSFTVEKGIYQTSNFRVQPTESIVRFPNITNLCPFGEVFNATRFASVYAWNRKRISNCVADYSVLYNSASFSTFKCYGVSPTKLNDLCFTNVYADSFVIRGDEVRQIAPGQTGKIADYNYKLPDDFTGCVIAWNSNNLDSKVGGNYNYLYRLFRKSNLKPFERDISTEIYQAGSTPCNGVKGFNCYFPLQSYGFQPTNGVGYQPYRVVVLSFELLHAPATVCGPKKSTNLVKNKCVNFNFNGLTGTGVLTESNKKFLPFQQFGRDIADTTDAVRDPQTLEILDITPCSFGGVSVITPGTNTSNQVAVLYQGVNCTEVPVAIHADQLTPTWRVYSTGSNVFQTRAGCLIGAEHVNNSYECDIPIGAGICASYQTQTNSPGSASSVASQSIIAYTMSLGAENSVAYSNNSIAIPTNFTISVTTEILPVSMTKTSVDCTMYICGDSTECSNLLLQYGSFCTQLNRALTGIAVEQDKNTQEVFAQVKQIYKTPPIKDFGGFNFSQILPDPSKPSKRSPIEDLLFNKVTLADAGFIKQYGDCLGDIAARDLICAQKFNGLTVLPPLLTDEMIAQYTSALLAGTITSGWTFGAGPALQIPFPMQMAYRFNGIGVTQNVLYENQKLIANQFNSAIGKIQDSLSSTPSALGKLQDVVNQNAQALNTLVKQLSSNFGAISSVLNDILSRLDPPEAEVQIDRLITGRLQSLQTYVTQQLIRAAEIRASANLAATKMSECVLGQSKRVDFCGKGYHLMSFPQSAPHGVVFLHVTYVPAQEKNFTTAPAICHDGKAHFPREGVFVSNGTHWFVTQRNFYEPQIITTDNTFVSGNCDVVIGIVNNTVYDPLQPELDSFKEELDKYFKNHTSPDVDLGDISGINASFVNIQKEIDRLNEVAKNLNESLIDLQELGKYGSGSGSGSGSGSGSGSMQWNSSTFHQALLDPRVRGLYFPAGGSSSGTVNPVPTTASPISSIFSRTGDPAPNMESTTSGFLGPLLALQAGFFLLTRILTIPQSLDSWWTSLNFLGGAPTCPGQNLQSPTSNHSPTSCPPICPGYRWMCLRRFIIFLFILLLCLIFLLVLLDYQGMLPVCPLLPGTSTTSTGPCKTCTIPAQGTSMFPSCCCTKPSDGNCTCIPIPSSWAFARFLWEWASVRFSWLSLLVPFVQWFVGLSPTVWLSVIWMMWYWGPSLYNILNPFLPLLPIFFCLWVYI

SEQ ID NO: 152 - protein, 1503 aa, synthetic construct
  REGION 1..1503: note = Recombinant Sequence
MFVFLVLLPLVSSQCVNLTTRTQLPPAYTNSFTRGVYYPDKVFRSSVLHSTQDLFLPFFSNVTWFHAIHVSGTNGTKRFDNPVLPFNDGVYFASTEKSNIIRGWIFGTTLDSKTQSLLIVNNATNVVIKVCEFQFCNDPFLGVYYHKNNKSWMESELRVYSSANNCTFEYVSQPFLMDLEGKQGNFKNLREFVFKNIDGYFKIYSKHTPINLVRDLPQGFSALEPLVDLPIGINITRFQTLLALHRSYLTPGDSSSGWTAGAAAYYVGYLQPRTFLLKYNENGTITDAVDCALDPLSETKCTLKSFTVEKGIYQTSNFRVQPTESIVRFPNITNLCPFGEVFNATRFASVYAWNRKRISNCVADYSFLYNSASFSTFKCYGVSPTKLNDLCFTNVYADSFVIRGDEVRQIAPGQTGKIADYNYKLPDDFTGCVIAWNSNNLDSKVGGNYNYLYRLFRKSNLKPFERDISTEIYQAGSTPCNGVEGFNCYFPLQSYGFQPTNGVGYQPYRVVVLSFELLHAPATVCGPKKSTNLVKNKCVNFNFNGLTGTGVLTESNKKFLPFQQFGRDIADTTDAVRDPQTLEILDITPCSFGGVSVITPGTNTSNQVAVLYHGVNCTEVPVAIHADQLTPTWRVYSTGSNVFQTRAGCLIGAEHVNNSYECDIPIGAGICASYQTQTNSRGSASSVASQSIIAYTMSLGAENSVAYSNNSIAIPTNFTISVTTEILPVSMTKTSVDCTMYICGDSTECSNLLLQYGSFCTQLNRALTGIAVEQDKNTQEVFAQVKQIYKTPPIKDFGGFNFSQILPDPSKPSKRSPIEDLLFNKVTLADAGFIKQYGDCLGDIAARDLICAQKFNGLTVLPPLLTDEMIAQYTSALLAGTITSGWTFGAGPALQIPFPMQMAYRFNGIGVTQNVLYENQKLIANQFNSAIGKIQDSLSSTPSALGKLQDVVNQNAQALNTLVKQLSSNFGAISSVLNDILSRLDPPEAEVQIDRLITGRLQSLQTYVTQQLIRAAEIRASANLAATKMSECVLGQSKRVDFCGKGYHLMSFPQSAPHGVVFLHVTYVPAQEKNFTTAPAICHDGKAHFPREGVFVSNGTHWFVTQRNFYEPQIITTDNTFVSGNCDVVIGIVNNTVYDPLQPELDSFKEELDKYFKNHTSPDVDLGDISGINASVVNIQKEIDRLNEVAKNLNESLIDLQELGKYGSGSGSGSGSGSGSGSMQWNSSTFHQALLDPRVRGLYFPAGGSSSGTVNPVPTTASPISSIFSRTGDPAPNMESTTSGFLGPLLALQAGFFLLTRILTIPQSLDSWWTSLNFLGGAPTCPGQNLQSPTSNHSPTSCPPICPGYRWMCLRRFIIFLFILLLCLIFLLVLLDYQGMLPVCPLLPGTSTTSTGPCKTCTIPAQGTSMFPSCCCTKPSDGNCTCIPIPSSWAFARFLWEWASVRFSWLSLLVPFVQWFVGLSPTVWLSVIWMMWYWGPSLYNILNPFLPLLPIFFCLWVYI

SEQ ID NO: 153 - protein, 1503 aa, synthetic construct
  REGION 1..1503: note = Recombinant Sequence
MFVFFVLLPLVSSQCVNLTTRTQLPPAYTNSFTRGVYYPDKVFRSSVLHSTQDLFLPFFSNVTWFHAIHVSGTNGTKRFDNPVLPFNDGVYFASIEKSNIIRGWIFGTTLDSKTQSLLIVNNATNVVIKVCEFQFCNDPFLGVYYHKNNKSWMESEFRVYSSANNCTFEYVSQPFLMDLEGKQGNFKNLREFVFKNIDGYFKIYSKHTPINLVRDLPQGFSALEPLVDLPIGINITRFQTLLALHRSYLTPGGSSSGWTAGAAAYYVGYLQPRTFLLKYNENGTITDAVDCALDPLSETKCTLKSFTVEKGIYQTSNFRVQPTESIVRFPNITNLCPFGEVFNATRFASVYAWNRKRISNCVADYSVLYNSASFSTFKCYGVSPTKLNDLCFTNVYADSFVIRGDEVRQIAPGQTGKIADYNYKLPDDFTGCVIAWNSNNLDSKVGGNYNYLYRLFRKSNLKPFERDISTEIYQAGNTPCNGVEGFNCYFPLQSYGFQPTNGVGYQPYRVVVLSFELLHAPATVCGPKKSTNLVKNKCVNFNFNGLTGTGVLTESNKKFLPFQQFGRDIADTTDAVRDPQTLEILDITPCSFGGVSVITPGTNTSNQVAVLYQGVNCTEVPVAIHADQLTPTWRVYSTGSNVFQTRAGCLIGAEHVNNSYECDIPIGAGICASYQTQTNSPGSASSVASQSIIAYTMSLGAENSVAYSNNSIAIPTNFTISVTTEILPVSMTKTSVDCTMYICGDSTECSNLLLQYGSFCTQLNRALTGIAVEQDKNTQEVFAQVKQIYKTPPIKDFGGFNFSQILPDPSKPSKRSPIEDLLFNKVTLADAGFIKQYGDCLGDIAARDLICAQKFNGLTVLPPLLTDEMIAQYTSALLAGTITSGWTFGAGPALQIPFPMQMAYRFNGIGVTQNVLYENQKLIANQFNSAIGKIQDSLSSTPSALGKLQDVVNQNARALNTLVKQLSSNFGAISSVLNDILSRLDPPEAEVQIDRLITGRLQSLQTYVTQQLIRAAEIRASANLAATKMSECVLGQSKRVDFCGKGYHLMSFPQSAPHGVVFLHVTYVPAQEKNFTTAPAICHDGKAHFPREGVFVSNGTHWFVTQRNFYEPQIITTDNTFVSGNCDVVIGIVNNTVYDPLQPELDSFKEELDKYFKNHTSPDVDLGDISGINASVVNIQKEIDRLNEVAKNLNESLIDLQELGKYGSGSGSGSGSGSGSGSMQWNSSTFHQALLDPRVRGLYFPAGGSSSGTVNPVPTTASPISSIFSRTGDPAPNMESTTSGFLGPLLALQAGFFLLTRILTIPQSLDSWWTSLNFLGGAPTCPGQNLQSPTSNHSPTSCPPICPGYRWMCLRRFIIFLFILLLCLIFLLVLLDYQGMLPVCPLLPGTSTTSTGPCKTCTIPAQGTSMFPSCCCTKPSDGNCTCIPIPSSWAFARFLWEWASVRFSWLSLLVPFVQWFVGLSPTVWLSVIWMMWYWGPSLYNILNPFLPLLPIFFCLWVYI

SEQ ID NO: 154 - protein, 1498 aa, synthetic construct
  REGION 1..1498: note = Recombinant Sequence
MFVFLVLLPLVSSQCVNLTTRTQLPPAYTNSFTRGVYYPDKVFRSSVLHSTQDLFLPFFSNVTWFHAIHVSGTNGTKRFDNPVLPFNDGVYFASTEKSNIIRGWIFGTTLDSKTQSLLIVNNATNVVIKVCEFQFCNDPFYYHKNNKSWMESEFRVYSSANNCTFEYVSQPFLMDLEGKQGNFKNLREFVFKNIDGYFKIYSKHTPINLVRDLPQGFSALEPLVDLPIGINITRFQTLLHRSYLTPGDSSSGWTAGAAACYVGYLQPRTFLLKYNENGTITDAVDCALDPLSETKCTLKSFTVEKGIYQTSNFRVQPTESIVRFPNITNLCPFGEVFNATRFASVYAWNRKRISNCVADYSVLYNSASFSTFKCYGVSPTKLNDLCFTNVYADSFVIRGDEVRQIAPGQTGKIADYNYKLPDDFTGCVIAWNSNNLDSKVGGNYNYLYRLFRKSNLKPFERDISTEIYQAGSTPCNGVKGFNCYFPLQSYGFQPTYGVGYQPYRVVVLSFELLHAPATVCGPKKSTNLVKNKCVNFNFNGLTGTGVLTESNKKFLPFQQFGRDIADTTDAVRDPQTLEILDITPCSFGGVSVITPGTNTSNQVAVLYQGVNCTEVPVAIHADQLTPTWRVYSTGSNVFQTRAGCLIGAEHVNNSYECDIPIGAGICASYQTQTNSHGSASSVASQSIIAYTMSLGAENSVAYSNNSIAIPTNFTISVTTEILPVSMTKTSVDCTMYICGDSTECSNLLLQYGSFCTQLNRALTGIAVEQDKNTQEVFAQVKQIYKTPPIKDFGGFNFSQILPDPSKPSKRSPIEDLLFNKVTLADAGFIKQYGDCLGDIAARDLICAQKFNGLTVLPPLLTDEMIAQYTSALLAGTITSGWTFGAGPALQIPFPMQMAYRFNGIGVTQNVLYENQKLIANQFNSAIGKIQDSLSSTPSALGKLQDVVNQNAQALNTLVKQLSSNFGAISSVLNDILSRLDPPEAEVQIDRLITGRLQSLQTYVTQQLIRAAEIRASANLAATKMSECVLGQSKRVDFCGKGYHLMSFPQSAPHGVVFLHVTYVPAQEKNFTTAPAICHDGKAHFPRKGVFVSNGTYWFVTQRNFYEPQIITTDNTFVSGNCDVVIGIVNNTVYDPLQPELDSFKEELDKYFKNHTSPDVDLGDISGINASFVNIQKEIDRLNEVAKNLNESLIDLQELGKYGSGSGSGSGSGSGSGSMQWNSSTFHQALLDPRVRGLYFPAGGSSSGTVNPVPTTASPISSIFSRTGDPAPNMESTTSGFLGPLLALQAGFFLLTRILTIPQSLDSWWTSLNFLGGAPTCPGQNLQSPTSNHSPTSCPPICPGYRWMCLRRFIIFLFILLLCLIFLLVLLDYQGMLPVCPLLPGTSTTSTGPCKTCTIPAQGTSMFPSCCCTKPSDGNCTCIPIPSSWAFARFLWEWASVRFSWLSLLVPFVQWFVGLSPTVWLSVIWMMWYWGPSLYNILNPFLPLLPIFFCLWVYI

SEQ ID NO: 155 - protein, 1503 aa, synthetic construct
  REGION 1..1503: note = Recombinant Sequence
MFVFLVLLPLVSSQCVNFTTRTQLPPAYTNSFTRGVYYPDKVFRSSVLHSTQDLFLPFFSNVTWFHAIHVSGTNGTKRFDNPVLPFNDGVYFASTEKSNIIRGWIFGTTLDSKTQSLLIVNNATNVVIKVCEFQFCNDPFLGVYYHKNNKSWMESEFRVYSSANNCTFEYVSQPFLMDLEGKQGNFKNLREFVFKNIDGYFKIYSKHTPINLVRDLPQGFSALEPLVDLPIGINITRFQTLLALHRSYLTPGDSSSGWTAGAAAYYVGYLQPRTFLLKYNENGTITDAVDCALDPLSETKCTLKSFTVEKGIYQTSNFRVQPTESIVRFPNITNLCPFGEVFNATRFASVYAWNRKRISNCVADYSVLYNSASFSTFKCYGVSPTKLNDLCFTNVYADSFVIRGDEVRQIAPGQTGKIADYNYKLPDDFTGCVIAWNSNNLDSKVGGNYNYRYRLFRKSNLKPFERDISTEIYQAGSTPCNGVEGFNCYFPLQSYGFQPTYGVGYQPYRVVVLSFELLHAPATVCGPKKSTNLVKNKCVNFNFNGLTGTGVLTESNKKFLPFQQFGRDIADTTDAVRDPQTLEILDITPCSFGGVSVITPGTNTSNQVAVLYQGVNCTEVPVAIHADQLTPTWRVYSTGSNVFQTRAGCLIGVEYVNNSYECDIPIGAGICASYQTQTNSPGSASSVASQSIIAYTMSLGAENSVAYSNNSIAIPTNFTISVTTEILPVSMTKTSVDCTMYICGDSTECSNLLLQYGSFCTQLNRALTGIAVEQDKNTQEVFAQVKQIYKTPPIKYFGGFNFSQILPDPSKPSKRSPIEDLLFNKVTLADAGFIKQYGDCLGDIAARDLICAQKFNGLTVLPPLLTDEMIAQYTSALLAGTITSGWTFGAGPALQIPFPMQMAYRFNGIGVTQNVLYENQKLIANQFNSAIGKIQDSLSSTPSALGKLQDVVNQNAQALNTLVKQLSSNFGAISSVLNDILSRLDPPEAEVQIDRLITGRLQSLQTYVTQQLIRAAEIRASANLAATKMSECVLGQSKRVDFCGKGYHLMSFPQSAPHGVVFLHVTYVPAQEKNFTTAPAICHDGKAHFPREGVFVSNGTHWFVTQRNFYEPQIITTDNTFVSGNCDVVIGIVNNTVYDPLQPELDSFKEELDKYFKNHTSPDVDLGDISGINASVVNIQKEIDRLNEVAKNLNESLIDLQELGKYGSGSGSGSGSGSGSGSMQWNSSTFHQALLDPRVRGLYFPAGGSSSGTVNPVPTTASPISSIFSRTGDPAPNMESTTSGFLGPLLALQAGFFLLTRILTIPQSLDSWWTSLNFLGGAPTCPGQNLQSPTSNHSPTSCPPICPGYRWMCLRRFIIFLFILLLCLIFLLVLLDYQGMLPVCPLLPGTSTTSTGPCKTCTIPAQGTSMFPSCCCTKPSDGNCTCIPIPSSWAFARFLWEWASVRFSWLSLLVPFVQWFVGLSPTVWLSVIWMMWYWGPSLYNILNPFLPLLPIFFCLWVYI

SEQ ID NO: 156 - protein, 1503 aa, synthetic construct
  REGION 1..1503: note = Recombinant Sequence
MFVFLVLLPLVSSQCVNLTTRTQLPPAYTNSFTRGVYYPDKVFRSSVLHSTQDLFLPFFSNVTWFHAIHVSGTNGTKRFDNPVLPFNDGVYFASTEKSNIIRGWIFGTTLDSKTQSLLIVNNATNVVIKVCEFQFCNDPFLGVYYHKNNKSWMESEFRVYSSANNCTFEYVSQPFLMDLEGKQGNFKNLREFVFKNIDGYFKIYSKHTPINLVRDLPQGFSALEPLVDLPIGINITRFQTLLALHRSYLTPGDSSSGWTAGAAAYYVGYLQPRTFLLKYNENGTITDAVDCALDPLSETKCTLKSFTVEKGIYQTSNFRVQPTESIVRFPNITNLCPFGEVFNATRFASVYAWNRKRISNCVADYSVLYNSASFSTFKCYGVSPTKLNDLCFTNVYADSFVIRGDEVRQIAPGQTGKIADYNYKLPDDFTGCVIAWNSNNLDSKVGGNYNYLYRLFRKSNLKPFERDISTEIYQAGSTPCNGVEGFNCYFPLQSYGFQPTTGVGYQPYRVVVLSFELLHAPATVCGPKKSTNLVKNKCVNFNFNGLTGTGVLTESNKKFLPFQQFGRDIADTTDAVRDPQTLEILDITPCSFGGVSVITPGTNTSNQVAVLYQDVNCTEVPVAIHADQLTPTWRVYSTGSNVFQTRAGCLIGAEHVNNSYECDIPIGAGICASYQTQTNSPGSASSVASQSIIAYTMSLGAENSVAYSNNSIAIPTNFTISVTTEILPVSMTKTSVDCTMYICGDSTECSNLLLQYGSFCTQLNRALTGIAVEQDKNTQEVFAQVKQIYKTPPIKDFGGFNFSQILPDPSKPSKRSPIEDLLFNKVTLADAGFIKQYGDCLGDIAARDLICAQKFNGLTVLPPLLTDEMIAQYTSALLAGTITSGWTFGAGPALQIPFPMQMAYRFNGIGVTQNVLYENQKLIANQFNSAIGKIQDSLSSTPSALGKLQDVVNQNAQALNTLVKQLSSNFGAISSVLNDILSRLDPPEAEVQIDRLITGRLQSLQTYVTQQLIRAAEIRASANLAATKMSECVLGQSKRVDFCGKGYHLMSFPQSAPHGVVFLHVTYVPAQEKNFTTAPAICHDGKAHFPREGVFVSNGTHWFVTQRNFYEPQIITTDNTFVSGNCDVVIGIVNNTVYDPLQPELDSFKEELDKYFKNHTSPDVDLGDISGINASVVNIQKEIDRLNEVAKNLNESLIDLQELGKYGSGSGSGSGSGSGSGSMQWNSSTFHQALLDPRVRGLYFPAGGSSSGTVNPVPTTASPISSIFSRTGDPAPNMESTTSGFLGPLLALQAGFFLLTRILTIPQSLDSWWTSLNFLGGAPTCPGQNLQSPTSNHSPTSCPPICPGYRWMCLRRFIIFLFILLLCLIFLLVLLDYQGMLPVCPLLPGTSTTSTGPCKTCTIPAQGTSMFPSCCCTKPSDGNCTCIPIPSSWAFARFLWEWASVRFSWLSLLVPFVQWFVGLSPTVWLSVIWMMWYWGPSLYNILNPFLPLLPIFFCLWVYI

SEQ ID NO: 157 - protein, 1503 aa, synthetic construct
  REGION 1..1503: note = Recombinant Sequence
MFVFFVLLPLVSSQCVNLTTRTQLPPAYTNSFTRGVYYPDKVFRSSVLHSTQDLFLPFFSNVTWFHAIHVSGTNGTKRFDNPVLPFNDGVYFASIEKSNIIRGWIFGTTLDSKTQSLLIVNNATNVVIKVCEFQFCNDPFLGVYYHKNNKSWMESEFRVYSSANNCTFEYVSQPFLMDLEGKQGNFKNLREFVFKNIDGYFKIYSKHTPINLVRDLPQGFSALEPLVDLPIGINITRFQTLLALHRSYLTPGGSSSGWTAGAAAYYVGYLQPRTFLLKYNENGTITDAVDCALDPLSETKCTLKSFTVEKGIYQTSNFRVQPTESIVRFPNITNLCPFGEVFNATRFASVYAWNRKRISNCVADYSVLYNSASFSTFKCYGVSPTKLNDLCFTNVYADSFVIRGDEVRQIAPGQTGKIADYNYKLPDDFTGCVIAWNSNNLDSKVGGNYNYLYRLFRKSNLKPFERDISTEIYQAGSTPCNGVEGFNCYFPLQSYGFQPTNGVGYQPYRVVVLSFELLHAPATVCGPKKSTNLVKNKCVNFNFNGLTGTGVLTESNKKFLPFQQFGRDIADTTDAVRDPQTLEILDITPCSFGGVSVITPGTNTSNQVAVLYQGVNCTEVPVAIHADQLTPTWRVYSTGSNVFQTRAGCLIGAEHVNNSYECDIPIGAGICASYQTQTNSPGSASSVASQSIIAYTMSLGVENSVAYSNNSIAIPTNFTISVTTEILPVSMTKTSVDCTMYICGDSTECSNLLLQYGSFCTQLNRALTGIAVEQDKNTQEVFAQVKQIYKTPPIKDFGGFNFSQILPDPSKPSKRSPIEDLLFNKVTLADAGFIKQYGDCLGDIAARDLICAQKFNGLTVLPPLLTDEMIAQYTSALLAGTITSGWTFGAGPALQIPFPMQMAYRFNGIGVTQNVLYENQKLIANQFNSAIGKIQDSLSSTPSALGKLQDVVNQNAQALNTLVKQLSSNFGAISSVLNDILSRLDPPEAEVQIDRLITGRLQSLQTYVTQQLIRAAEIRASANLAATKMSECVLGQSKRVDFCGKGYHLMSFPQSAPHGVVFLHVTYVPAQEKNFTTAPAICHDGKAHFPREGVFVSNGTHWFVTQRNFYEPQIITTDNTFVSGNCDVVIGIVNNTVYDPLQPELDSFKEELDKYFKNHTSPDVDLGDISGINASVVNIQKEIDRLNEVAKNLNESLIDLQELGKYGSGSGSGSGSGSGSGSMQWNSSTFHQALLDPRVRGLYFPAGGSSSGTVNPVPTTASPISSIFSRTGDPAPNMESTTSGFLGPLLALQAGFFLLTRILTIPQSLDSWWTSLNFLGGAPTCPGQNLQSPTSNHSPTSCPPICPGYRWMCLRRFIIFLFILLLCLIFLLVLLDYQGMLPVCPLLPGTSTTSTGPCKTCTIPAQGTSMFPSCCCTKPSDGNCTCIPIPSSWAFARFLWEWASVRFSWLSLLVPFVQWFVGLSPTVWLSVIWMMWYWGPSLYNILNPFLPLLPIFFCLWVYI

SEQ ID NO: 158 - protein, 1503 aa, synthetic construct
  REGION 1..1503: note = Recombinant Sequence
MFVFLVLLPLVSSQCVNLTTRTQLPPAYTNSFTRGVYYPDKVFRSSVLHSTQDLFLPFFSNVTWFHAIHVSGTNGTKRFDNPVLPFNDGVYFASTEKSNIIRGWIFGTTLDSKTQSLLIVNNATNVVIKVCEFQFCNDPFLSVYYHKNNKSWMESEFRVYSSANNCTFEYVSQPFLMDLVGKQGNFKNLREFVFKNIDGYFKIYSKHTPINLVRDLPQGFSALEPLVDLPIGINITRFQTLLALHRSYLTPGDSSSGWTAGAAAYYVGYLQPRTFLLKYNENGTITDAVDCALDPLSETKCTLKSFTVEKGIYQTSNFRVQPTESIVRFPNITNLCPFGEVFNATRFASVYAWNRKRISNCVADYSVLYNSASFSTFKCYGVSPTKLNDLCFTNVYADSFVIRGDEVRQIAPGQTGKIADYNYKLPDDFTGCVIAWNSNNLDSKVGGNYNYLYRLFRKSNLKPFERDISTEIYQAGSTPCNGVEGFNCYFPLQSYGFQPTNGVGYQPYRVVVLSFELLHAPATVCGPKKSTNLVKNKCVNFNFNGLTGTGVLTESNKKFLPFQQFGRDIADTTDAVRDPQTLEILDITPCSFGGVSVITPGTNTSNQVAVLYQGVNCTEVPVAIHADQLTPTWRVYSTGSNVFQTRAGCLIGAEHVNNSYECDIPIGAGICASYQTHTNSPGSASSVASQSIIAYTMSLGAENSVAYSNNSIAIPTNFTISVTTEILPVSMTKTSVDCTMYICGDSTECSNLLLQYGSFCTQLNRALTGIAVEQDKNTQEVFAQVKQIYKTPPIKDFGGFNFSQILPDPSKPSKRSPIEDLLFNKVTLADAGFIKQYGDCLGDIAARDLICAQKFNGLTVLPPLLTDEMIAQYTSALLAGTITSGWTFGAGPALQIPFPMQMAYRFNGIGVTQNVLYENQKLIANQFNSAIGKIQDSLSSTPSALGKLQDVVNQNAQALNTLVKQLSSNFGAISSVLNDILSRLDPPEAEVQIDRLITGRLQSLQTYVTQQLIRAAEIRASANLAATKMSECVLGQSKRVDFCGKGYHLMSFPQSAPHGVVFLHVTYVPAQEKNFTTAPAICHDGKAHFPREGVFVSNGTHWFVTQRNFYEPQIITTDNTFVSGNCDVVIGIVNNTVYDPLQPELDSFKEELDKYFKNHTSPDVDLGDISGINASVVNIQKEIDRLNEVAKNLNESLIDLQELGKYGSGSGSGSGSGSGSGSMQWNSSTFHQALLDPRVRGLYFPAGGSSSGTVNPVPTTASPISSIFSRTGDPAPNMESTTSGFLGPLLALQAGFFLLTRILTIPQSLDSWWTSLNFLGGAPTCPGQNLQSPTSNHSPTSCPPICPGYRWMCLRRFIIFLFILLLCLIFLLVLLDYQGMLPVCPLLPGTSTTSTGPCKTCTIPAQGTSMFPSCCCTKPSDGNCTCIPIPSSWAFARFLWEWASVRFSWLSLLVPFVQWFVGLSPTVWLSVIWMMWYWGPSLYNILNPFLPLLPIFFCLWVYI

SEQ ID NO: 159 - protein, 1503 aa, synthetic construct
  REGION 1..1503: note = Recombinant Sequence
MFVFLVLLPLVSSQCVNLTTRTQLPPAYTNSFTRGVYYPDKVFRSSVLHSTQDLFLPFFSNVTWFHAIHVSGTNGTKRFDNPVLPFNDGVYFASTEKSNIIRGWIFGTTLDSKTQSLLIVNNATNVVIKVCEFQFCNDPFLGVYYHKNNKSWMESEFRVYSSANNCTFEYVSQPFLMDLEGKQGNFKNLREFVFKNIDGYFKIYSKHTPINLVRDLPQGFSALEPLVDLPIGINITRFQTLLALHRSYLTPGDSSSGWTAGAAAYYVGYLQPRTFLLKYNENGTITDAVDCALDPLSETKCTLKSFTVEKGIYQTSNFRVQPTESIVRFPNITNLCPFGEVFNATRFASVYAWNRKRISNCVADYSVLYNSASFSTFKCYGVSPTKLNDLCFTNVYADSFVIRGDEVRQIAPGQTGKIADYNYKLPDDFTGCVIAWNSNNLDSKVGGNYNYLYRLFRKSNLKPFERDISTEIYQAGSTPCNGVKGFNCYFPLQPYGFQPTYGVGYQPYRVVVLSFELLHAPATVCGPKKSTNLVKNKCVNFNFNGLTGTGVLTESNKKFLPFQQFGRDIADTTDAVRDPQTLEILDITPCSFGGVSVITPGTNTSNQVAVLYQGVNCTEVPVAIHADQLTPTWRVYSTGSNVFQTRAGCLIGAEHVNNSYECDIPIGAGICASYQTQTNSHGSASSVASQSIIAYTMSLGAENSVAYSNNSIAIPTNFTISVTTEILPVSMTKTSVDCTMYICGDSTECSNLLLQYGSFCTQLNRALTGIAVEQDKNTQEVFAQVKQIYKTPPIKDFGGFNFSQILPDPSKPSKRSPIEDLLFNKVTLADAGFIKQYGDCLGDIAARDLICAQKFNGLTVLPPLLTDEMIAQYTSALLAGTITSGWTFGAGPALQIPFPMQMAYRFNGIGVTQNVLYENQKLIANQFNSAIGKIQDSLSSTPSALGKLQDVVNQNAQALNTLVKQLSSNFGAISSVLNDILSRLDPPEAEVQIDRLITGRLQSLQTYVTQQLIRAAEIRASANLAATKMSECVLGQSKRVDFCGKGYHLMSFPQSAPHGVVFLHVTYVPAQEKNFTTAPAICHDGKAHFPREGVFVSNGTHWFVTQRNFYKPQIITTDNTFVSGNCDVVIGIVNNTVYDPLQPELDSFKEELDKYFKNHTSPDVDLGDISGINASVVNIQKEIDRLNEVAKNLNESLIDLQELGKYGSGSGSGSGSGSGSGSMQWNSSTFHQALLDPRVRGLYFPAGGSSSGTVNPVPTTASPISSIFSRTGDPAPNMESTTSGFLGPLLALQAGFFLLTRILTIPQSLDSWWTSLNFLGGAPTCPGQNLQSPTSNHSPTSCPPICPGYRWMCLRRFIIFLFILLLCLIFLLVLLDYQGMLPVCPLLPGTSTTSTGPCKTCTIPAQGTSMFPSCCCTKPSDGNCTCIPIPSSWAFARFLWEWASVRFSWLSLLVPFVQWFVGLSPTVWLSVIWMMWYWGPSLYNILNPFLPLLPIFFCLWVYI

SEQ ID NO: 160 - protein, 1502 aa, synthetic construct
  REGION 1..1502: note = Recombinant Sequence
MFVFLVLLPLVSSQCVNLTTRTQLPPAYTNSFTRGVYYPDKVFRSSVLHSTQDLFLPFFSNVTWFDAIHVSGTNGTKRFDNPVLPFNDGVYFASTEKSNIIRGWIFGTTLDSKTQSLLIVNNATNVVIKVCEFQFCNDPFLVVYHKNNKSWMESEFRVYSSANNCTFEYVSQPFLMDLEGKQGNFKNLREFVFKNIDGYFKIYSKHTPINLVRGLPQGFSALEPLVDLPIGINITRFQTLLALHRSYLTPGDSSSGWTAGAAAYYVGYLQPRTFLLKYNENGTITDAVDCALDPLSETKCTLKSFTVEKGIYQTSNFRVQPTESIVRFPNITNLCPFGEVFNATRFASVYAWNRKRISNCVADYSVLYNSASFSTFKCYGVSPTKLNDLCFTNVYADSFVIRGDEVRQIAPGQTGKIADYNYKLPDDFTGCVIAWNSNNLDSKVGGNYNYLYRLFRKSNLKPFERDISTEIYQAGSTPCNGAEGFNCYFPLQSYGFQPTNGVGYQPYRVVVLSFELLHAPATVCGPKKSTNLVKNKCVNFNFNGLTGTGVLTESNKKFLPFQQFGRDIADTTDAVRDPQTLEILDITPCSFGGVSVITPGTNTSNQVAVLYQDVNCTEVPVAIHADQLTPTWRVYSTGSNVFQTRAGCLIGAEYVNNSYECDIPIGASICASYQTQTNSPGSASSVASQSIIAYTMSLGAENSVAYSNNSIAIPTNFTISVTTEILPVSMTKTSVDCTMYICGDSTECSNLLLQYGSFCTQLNRALTGIAVEQDKNTQEVFAQVKQIYKTPPIKDFGGFNFSQILPDPSKPSKRSPIEDLLFNKVTLADAGFIKQYGDCLGDIAARDLICAQKFNGLTVLPPLLTDEMIAQYTSALLAGTITSGWTFGAGPALQIPFPMQMAYRFNGIGVTQNVLYENQKLIANQFNSAIGKIQDSLSSTPSALGKLRDVVNQNAQALNTLVKQLSSNFGAISSVLNDILSRLDPPEAEVQIDRLITGRLQSLQTYVTQQLIRAAEIRASANLAATKMSECVLGQSKRVDFCGKGYHLMSFPQSAPHGVVFLHVTYVPAQEKNFTTAPAICHDGKDHFPREGVFVSNGTHWFVTQRNFYEPQIITTDNTFVSGNCDVVIGIVNNTVYDPLQPELDSFKEELDKYFKNHTSPDVDLGDISGINASVVNIQKEIDRLNEVAKNLNESLIDLQELGKYGSGSGSGSGSGSGSGSMQWNSSTFHQALLDPRVRGLYFPAGGSSSGTVNPVPTTASPISSIFSRTGDPAPNMESTTSGFLGPLLALQAGFFLLTRILTIPQSLDSWWTSLNFLGGAPTCPGQNLQSPTSNHSPTSCPPICPGYRWMCLRRFIIFLFILLLCLIFLLVLLDYQGMLPVCPLLPGTSTTSTGPCKTCTIPAQGTSMFPSCCCTKPSDGNCTCIPIPSSWAFARFLWEWASVRFSWLSLLVPFVQWFVGLSPTVWLSVIWMMWYWGPSLYNILNPFLPLLPIFFCLWVYI

SEQ ID NO: 161 - protein, 1503 aa, synthetic construct
  REGION 1..1503: note = Recombinant Sequence
MFVFLVLLPLVSSQCVNLTTRTQLPPAYTNSFTRGVYYPDKVFRSSVLHSTQDLFLPFFSNVTWFHAIHVSGTNGTKRFDNPVLPFNDGVYFASTEKSNIIRGWIFGTTLDSKTQSLLIVNNATNVVIKVCEFQFCNDPFLGVYYHKNNKSWMESEFRVYSSANNCTFEYVSQPFLMDLEGKQGNFKNLREFVFKNIDGYFKIYSKHTPINLVRDLPQGFSALEPLVDLPIGINITRFQTLLALHRSYLTPGDSSSGWTAGAAAYYVGYLQPRTFLLKYNENGTITDAVDCALDPLSETKCTLKSFTVEKGIYQTSNFRVQPTESIVRFPNITNLCPFGEVFNATRFASVYAWNRKRISNCVADYSVLYNSASFSTFKCYGVSPTKLNDLCFTNVYADSFVIRGDEVRQIAPGQTGKIADYNYKLPDDFTGCVIAWNSNNLDSKVGGNYNYLYRLFRKSNLKPFERDISTEIYQAGSTPCNGVEGFNCYFPLQPYGFQPTNGVGYQPYRVVVLSFELLHAPATVCGPKKSTNLVKNKCVNFNFNGLTGTGVLTESNKKFLPFQQFGRDIADTTDAVRDPQTLEILDITPCSFGGVSVITPGTNTSNQVAVLYQGVNCTEVPVAIHADQLTPTWRVYSTGSNVFQTRAGCLIGAEHVNNSYECDIPIGAGICASYQTQTNSHGSASSVASQSIIAYTMSLGAENSVAYSNNSIAIPINFTISVTTEILPVSMTKTSVDCTMYICGDSTECSNLLLQYGSFCTQLNRALTGIAVEQDKNTQEVFAQVKQIYKTPPIKDFGGFNFSQILPDPSKPSKRSPIEDLLFNKVTLADAGFIKQYGDCLGDIAARDLICAQKFNGLTVLPPLLTDEMIAQYTSALLAGTITSGWTFGAGPALQIPFPMQMAYRFNGIGVTQNVLYENQKLIANQFNSAIGKIQDSLSSTPSALGKLQDVVNQNAQALNTLVKQLSSNFGAISSVLNDILSRLDPPEAEVQIDRLITGRLQSLQTYVTQQLIRAAEIRASANLAATKMSECVLGQSKRVDFCGKGYHLMSFPQSAPHGVVFLHVTYVPAQEKNFTTAPAICHDGKAHFPREGVFVSNGTHWFVTQRNFYEPQIITTDNTFVSGNCDVVIGIVNNTVYDPLQPELDSFKEELDKYFKNHTSPDVDLGDISGINASVVNIQKEIDRLNEVAKNLNESLIDLQELGKYGSGSGSGSGSGSGSGSMQWNSSTFHQALLDPRVRGLYFPAGGSSSGTVNPVPTTASPISSIFSRTGDPAPNMESTTSGFLGPLLALQAGFFLLTRILTIPQSLDSWWTSLNFLGGAPTCPGQNLQSPTSNHSPTSCPPICPGYRWMCLRRFIIFLFILLLCLIFLLVLLDYQGMLPVCPLLPGTSTTSTGPCKTCTIPAQGTSMFPSCCCTKPSDGNCTCIPIPSSWAFARFLWEWASVRFSWLSLLVPFVQWFVGLSPTVWLSVIWMMWYWGPSLYNILNPFLPLLPIFFCLWVYI

SEQ ID NO: 162 - protein, 1511 aa, synthetic construct
  REGION 1..1511: note = Recombinant Sequence
MFVFLVLLPLVSSQCVNLTTRTQLPPAYTNSFTRGVYYPDKVFRSSVLHSTQDLFLPFFSNVTWFHAIHVSGTNGTKRFDNPVLPFNDGVYFASTEKSNIIRGWIFGTTLDSKTQSLLIVNNATNVVIKVCEFQFCNDPFLGVYYHKNNKSWMESEFRVYSSANNCTFEYVSQPFLMDLEGKQGNFKNLREFVFKNIDGYFKIYSKHTPINLVRDLPQGFSALEPLVDLPIGINITRFQTLLALHRSYLTPGDSSSGWTAGAAAYYVGYLQPRTFLLKYNENGTITDAVDCALDPLSETKCTLKSFTVEKGIYQTSNFRVQPTESIVRFPNITNLCPFGEVFNATRFASVYAWNRKRISNCVADYSVLYNSASFSTFKCYGVSPTKLNDLCFTNVYADSFVIRGDEVRQIAPGQTGKIADYNYKLPDDFTGCVIAWNSNNLDSKVGGNYNYLYRLFRKSNLKPFERDISTEIYQAGSTPCNGVEGFNCYFPLQSYGFQPTNGVGYQPYRVVVLSFELLHAPATVCGPKKSTNLVKNKCVNFNFNGLTGTGVLTESNKKFLPFQQFGRDIADTTDAVRDPQTLEILDITPCSFGGVSVITPGTNTSNQVAVLYQDVNCTEVPVAIHADQLTPTWRVYSTGSNVFQTRAGCLIGAEHVNNSYECDIPIGAGICASYQTQTNSPGSASSVASQSIIAYTMSLGAENSVAYSNNSIAIPTNFTISVTTEILPVSMTKTSVDCTMYICGDSTECSNLLLQYGSFCTQLNRALTGIAVEQDKNTQEVFAQVKQIYKTPPIKDFGGFNFSQILPDPSKPSKRSPIEDLLFNKVTLADAGFIKQYGDCLGDIAARDLICAQKFNGLTVLPPLLTDEMIAQYTSALLAGTITSGWTFGAGPALQIPFPMQMAYRFNGIGVTQNVLYENQKLIANQFNSAIGKIQDSLSSTPSALGKLQDVVNQNAQALNTLVKQLSSNFGAISSVLNDILSRLDPPEAEVQIDRLITGRLQSLQTYVTQQLIRAAEIRASANLAATKMSECVLGQSKRVDFCGKGYHLMSFPQSAPHGVVFLHVTYVPAQEKNFTTAPAICHDGKAHFPREGVFVSNGTHWFVTQRNFYEPQIITTDNTFVSGNCDVVIGIVNNTVYDPLQPELDSFKEELDKYFKNHTSPDVDLGDISGINASVVNIQKEIDRLNEVAKNLNESLIDLQELGKYGSGSGSGSGSGSGSGSGSGSGSGSMQWNSSTFHQALLDPRVRGLYFPAGGSSSGTVNPVPTTASPISSIFSRTGDPAPNMESTTSGFLGPLLALQAGFFLLTRILTIPQSLDSWWTSLNFLGGAPTCPGQNLQSPTSNHSPTSCPPICPGYRWMCLRRFIIFLFILLLCLIFLLVLLDYQGMLPVCPLLPGTSTTSTGPCKTCTIPAQGTSMFPSCCCTKPSDGNCTCIPIPSSWAFARFLWEWASVRFSWLSLLVPFVQWFVGLSPTVWLSVIWMMWYWGPSLYNILNPFLPLLPIFFCLWVYI

SEQ ID NO: 163 - protein, 1509 aa, synthetic construct
  REGION 1..1509: note = Recombinant Sequence
MFVFLVLLPLVSSQCVNLRTRTQLPPAYTNSFTRGVYYPDKVFRSSVLHSTQDLFLPFFSNVTWFHAIHVSGTNGTKRFDNPVLPFNDGVYFASTEKSNIIRGWIFGTTLDSKTQSLLIVNNATNVVIKVCEFQFCNDPFLDVYYHKNNKSWMESGVYSSANNCTFEYVSQPFLMDLEGKQGNFKNLREFVFKNIDGYFKIYSKHTPINLVRDLPQGFSALEPLVDLPIGINITRFQTLLALHRSYLTPGDSSSGWTAGAAAYYVGYLQPRTFLLKYNENGTITDAVDCALDPLSETKCTLKSFTVEKGIYQTSNFRVQPTESIVRFPNITNLCPFGEVFNATRFASVYAWNRKRISNCVADYSVLYNSASFSTFKCYGVSPTKLNDLCFTNVYADSFVIRGDEVRQIAPGQTGKIADYNYKLPDDFTGCVIAWNSNNLDSKVGGNYNYRYRLFRKSNLKPFERDISTEIYQAGSKPCNGVEGFNCYFPLQSYGFQPTNGVGYQPYRVVVLSFELLHAPATVCGPKKSTNLVKNKCVNFNFNGLTGTGVLTESNKKFLPFQQFGRDIADTTDAVRDPQTLEILDITPCSFGGVSVITPGTNTSNQVAVLYQGVNCTEVPVAIHADQLTPTWRVYSTGSNVFQTRAGCLIGAEHVNNSYECDIPIGAGICASYQTQTNSRGSASSVASQSIIAYTMSLGAENSVAYSNNSIAIPTNFTISVTTEILPVSMTKTSVDCTMYICGDSTECSNLLLQYGSFCTQLNRALTGIAVEQDKNTQEVFAQVKQIYKTPPIKDFGGFNFSQILPDPSKPSKRSPIEDLLFNKVTLADAGFIKQYGDCLGDIAARDLICAQKFNGLTVLPPLLTDEMIAQYTSALLAGTITSGWTFGAGPALQIPFPMQMAYRFNGIGVTQNVLYENQKLIANQFNSAIGKIQDSLSSTPSALGKLQNVVNQNAQALNTLVKQLSSNFGAISSVLNDILSRLDPPEAEVQIDRLITGRLQSLQTYVTQQLIRAAEIRASANLAATKMSECVLGQSKRVDFCGKGYHLMSFPQSAPHGVVFLHVTYVPAQEKNFTTAPAICHDGKAHFPREGVFVSNGTHWFVTQRNFYEPQIITTDNTFVSGNCDVVIGIVNNTVYDPLQPELDSFKEELDKYFKNHTSPDVDLGDISGINASVVNIQKEIDRLNEVAKNLNESLIDLQELGKYGSGSGSGSGSGSGSGSGSGSGSGSMQWNSSTFHQALLDPRVRGLYFPAGGSSSGTVNPVPTTASPISSIFSRTGDPAPNMESTTSGFLGPLLALQAGFFLLTRILTIPQSLDSWWTSLNFLGGAPTCPGQNLQSPTSNHSPTSCPPICPGYRWMCLRRFIIFLFILLLCLIFLLVLLDYQGMLPVCPLLPGTSTTSTGPCKTCTIPAQGTSMFPSCCCTKPSDGNCTCIPIPSSWAFARFLWEWASVRFSWLSLLVPFVQWFVGLSPTVWLSVIWMMWYWGPSLYNILNPFLPLLPIFFCLWVYI

SEQ ID NO: 164 - protein, 1509 aa, synthetic construct
  REGION 1..1509: note = Recombinant Sequence
MFVFLVLLPLVSSQCVNLRTRTQLPPAYTNSFTRGVYYPDKVFRSSVLHSTQDLFLPFFSNVTWFHAIHFSGTNGTKRFDNPVLPFNDGVYFASIEKSNIIRGWIFGTTLDSKTQSLLIVNNATNVVIKVCEFQFCNDPFLDVYYHKNNKSWMESGVYSSANNCTFEYVSQPFLMDLEGKQGNFKNLREFVFKNIDGYFKIYSKHTPINLVRDLPQGFSVLEPLVDLPIGINITRFQTLLALHRSYLTPGDSSSGLTAGAAAYYVGYLQPRTFLLKYNENGTITDAVDCALDPLSETKCTLKSFTVEKGIYQTSNFRVQPTESIVRFPNITNLCPFGEVFNATRFASVYAWNRKRISNCVADYSVLYNSASFSTFKCYGVSPTKLNDLCFTNVYADSFVIRGDEVRQIAPGQTGNIADYNYKLPDDFTGCVIAWNSNNLDSKVGGNYNYRYRLFRKSNLKPFERDISTEIYQAGSKPCNGVEGFNCYFPLQSYGFQPTNGVGYQPYRVVVLSFELLHAPATVCGPKKSTNLVKNKCVNFNFNGLTGTGVLTESNKKFLPFQQFGRDIADTTDAVRDPQTLEILDITPCSFGGVSVITPGTNTSNQVAVLYQGVNCTEVPVAIHADQLTPTWRVYSTGSNVFQTRAGCLIGAEHVNNSYECDIPIGAGICASYQTQTNSRGSASSVASQSIIAYTMSLGAENSVAYSNNSIAIPTNFTISVTTEILPVSMTKTSVDCTMYICGDSTECSNLLLQYGSFCTQLNRALTGIAVEQDKNTQEVFAQVKQIYKTPPIKDFGGFNFSQILPDPSKPSKRSPIEDLLFNKVTLADAGFIKQYGDCLGDIAARDLICAQKFNGLTVLPPLLTDEMIAQYTSALLAGTITSGWTFGAGPALQIPFPMQMAYRFNGIGVTQNVLYENQKLIANQFNSAIGKIQDSLSSTPSALGKLQNVVNQNAQALNTLVKQLSSNFGAISSVLNDILSRLDPPEAEVQIDRLITGRLQSLQTYVTQQLIRAAEIRASANLAATKMSECVLGQSKRVDFCGKGYHLMSFPQSAPHGVVFLHVTYVPAQEKNFTTAPAICHDGKAHFPREGVFVSNGTHWFVTQRNFYEPQIITTDNTFVSGNCDVVIGIVNNTVYDPLQPELDSFKEELDKYFKNHTSPDVDLGDISGINASVVNIQKEIDRLNEVAKNLNESLIDLQELGKYGSGSGSGSGSGSGSGSGSGSGSGSMQWNSSTFHQALLDPRVRGLYFPAGGSSSGTVNPVPTTASPISSIFSRTGDPAPNMESTTSGFLGPLLALQAGFFLLTRILTIPQSLDSWWTSLNFLGGAPTCPGQNLQSPTSNHSPTSCPPICPGYRWMCLRRFIIFLFILLLCLIFLLVLLDYQGMLPVCPLLPGTSTTSTGPCKTCTIPAQGTSMFPSCCCTKPSDGNCTCIPIPSSWAFARFLWEWASVRFSWLSLLVPFVQWFVGLSPTVWLSVIWMMWYWGPSLYNILNPFLPLLPIFFCLWVYI

SEQ ID NO: 165 - protein, 1508 aa, synthetic construct
  REGION 1..1508: note = Recombinant Sequence
MFVFLVLLPLVSSQCVNLTTRTQLPPAYTNSFTRGVYYPDKVFRSSVLHSTQDLFLPFFSNVTWFHAISGTNGTKRFDNPVLPFNDGVYFASTEKSNIIRGWIFGTTLDSKTQSLLIVNNATNVVIKVCEFQFCNDPFLGVYHKNNKSWMESEFRVYSSANNCTFEYVSQPFLMDLEGKQGNFKNLREFVFKNIDGYFKIYSKHTPINLVRDLPQGFSALEPLVDLPIGINITRFQTLLALHRSYLTPGDSSSGWTAGAAAYYVGYLQPRTFLLKYNENGTITDAVDCALDPLSETKCTLKSFTVEKGIYQTSNFRVQPTESIVRFPNITNLCPFGEVFNATRFASVYAWNRKRISNCVADYSVLYNSASFSTFKCYGVSPTKLNDLCFTNVYADSFVIRGDEVRQIAPGQTGKIADYNYKLPDDFTGCVIAWNSNNLDSKVGGNYNYLYRLFRKSNLKPFERDISTEIYQAGSTPCNGVEGFNCYFPLQSYGFQPTYGVGYQPYRVVVLSFELLHAPATVCGPKKSTNLVKNKCVNFNFNGLTGTGVLTESNKKFLPFQQFGRDIDDTTDAVRDPQTLEILDITPCSFGGVSVITPGTNTSNQVAVLYQGVNCTEVPVAIHADQLTPTWRVYSTGSNVFQTRAGCLIGAEHVNNSYECDIPIGAGICASYQTQTNSHGSASSVASQSIIAYTMSLGAENSVAYSNNSIAIPINFTISVTTEILPVSMTKTSVDCTMYICGDSTECSNLLLQYGSFCTQLNRALTGIAVEQDKNTQEVFAQVKQIYKTPPIKDFGGFNFSQILPDPSKPSKRSPIEDLLFNKVTLADAGFIKQYGDCLGDIAARDLICAQKFNGLTVLPPLLTDEMIAQYTSALLAGTITSGWTFGAGPALQIPFPMQMAYRFNGIGVTQNVLYENQKLIANQFNSAIGKIQDSLSSTPSALGKLQDVVNQNAQALNTLVKQLSSNFGAISSVLNDILARLDPPEAEVQIDRLITGRLQSLQTYVTQQLIRAAEIRASANLAATKMSECVLGQSKRVDFCGKGYHLMSFPQSAPHGVVFLHVTYVPAQEKNFTTAPAICHDGKAHFPREGVFVSNGTHWFVTQRNFYEPQIITTHNTFVSGNCDVVIGIVNNTVYDPLQPELDSFKEELDKYFKNHTSPDVDLGDISGINASVVNIQKEIDRLNEVAKNLNESLIDLQELGKYGSGSGSGSGSGSGSGSGSGSGSGSMQWNSSTFHQALLDPRVRGLYFPAGGSSSGTVNPVPTTASPISSIFSRTGDPAPNMESTTSGFLGPLLALQAGFFLLTRILTIPQSLDSWWTSLNFLGGAPTCPGQNLQSPTSNHSPTSCPPICPGYRWMCLRRFIIFLFILLLCLIFLLVLLDYQGMLPVCPLLPGTSTTSTGPCKTCTIPAQGTSMFPSCCCTKPSDGNCTCIPIPSSWAFARFLWEWASVRFSWLSLLVPFVQWFVGLSPTVWLSVIWMMWYWGPSLYNILNPFLPLLPIFFCLWVYI

SEQ ID NO: 166 - protein, 1508 aa, synthetic construct
  REGION 1..1508: note = Recombinant Sequence
MFVFLVLLPLVSSQCVNLTTRTQLPPAYTNSFTRGVYYPDKVFRSSVLHSTQDLFLPFFSNVTWFHAISGTNGTKRFDNPVLPFNDGVYFASTEKSNIIRGWIFGTTLDSKTQSLLIVNNATNVVIKVCEFQFCNDPFLGVYHKNNKSWMESEFRVYSSANNCTFEYVSQPFLMDLEGKQGNFKNLREFVFKNIDGYFKIYSKHTPINLVRDLPQGFSALEPLVDLPIGINITRFQTLLALHRSYLTPGDSSSGWTAGAAAYYVGYLQPRTFLLKYNENGTITDAVDCALDPLSETKCTLKSFTVEKGIYQTSNFRVQPTESIVRFPNITNLCPFGEVFNATRFASVYAWNRKRISNCVADYSVLYNSASFSTFKCYGVSPTKLNDLCFTNVYADSFVIRGDEVRQIAPGQTGKIADYNYKLPDDFTGCVIAWNSNNLDSKVGGNYNYLYRLFRKSNLKPFERDISTEIYQAGSTPCNGVKGFNCYFPLQPYGFQPTYGVGYQPYRVVVLSFELLHAPATVCGPKKSTNLVKNKCVNFNFNGLTGTGVLTESNKKFLPFQQFGRDIDDTTDAVRDPQTLEILDITPCSFGGVSVITPGTNTSNQVAVLYQGVNCTEVPVAIHADQLTPTWRVYSTGSNVFQTRAGCLIGAEHVNNSYECDIPIGAGICASYQTQTNSHGSASSVASQSIIAYTMSLGAENSVAYSNNSIAIPINFTISVTTEILPVSMTKTSVDCTMYICGDSTECSNLLLQYGSFCTQLNRALTGIAVEQDKNTQEVFAQVKQIYKTPPIKDFGGFNFSQILPDPSKPSKRSPIEDLLFNKVTLADAGFIKQYGDCLGDIAARDLICAQKFNGLTVLPPLLTDEMIAQYTSALLAGTITSGWTFGAGPALQIPFPMQMAYRFNGIGVTQNVLYENQKLIANQFNSAIGKIQDSLSSTPSALGKLQDVVNQNAQALNTLVKQLSSNFGAISSVLNDILARLDPPEAEVQIDRLITGRLQSLQTYVTQQLIRAAEIRASANLAATKMSECVLGQSKRVDFCGKGYHLMSFPQSAPHGVVFLHVTYVPAQEKNFTTAPAICHDGKAHFPREGVFVSNGTHWFVTQRNFYEPQIITTHNTFVSGNCDVVIGIVNNTVYDPLQPELDSFKEELDKYFKNHTSPDVDLGDISGINASVVNIQKEIDRLNEVANNLNESLIDLQELGKYGSGSGSGSGSGSGSGSGSGSGSGSMQWNSSTFHQALLDPRVRGLYFPAGGSSSGTVNPVPTTASPISSIFSRTGDPAPNMESTTSGFLGPLLALQAGFFLLTRILTIPQSLDSWWTSLNFLGGAPTCPGQNLQSPTSNHSPTSCPPICPGYRWMCLRRFIIFLFILLLCLIFLLVLLDYQGMLPVCPLLPGTSTTSTGPCKTCTIPAQGTSMFPSCCCTKPSDGNCTCIPIPSSWAFARFLWEWASVRFSWLSLLVPFVQWFVGLSPTVWLSVIWMMWYWGPSLYNILNPFLPLLPIFFCLWVYI

SEQ ID NO: 167 - protein, 1508 aa, synthetic construct
  REGION 1..1508: note = Recombinant Sequence
MFVFLVLLPLVSSQCVNFTTRTQLPPAYTNSFTRGVYYPDKVFRSSVLHSTQDLFLPFFSNVTWFHAIHVSGTNGTKRFANPVLPFNDGVYFASTEKSNIIRGWIFGTTLDSKTQSLLIVNNATNVVIKVCEFQFCNDPFLGVYYHKNNKSWMESEFRVYSSANNCTFEYVSQPFLMDLEGKQGNFKNLREFVFKNIDGYFKIYSKHTPINLVRGLPQGFSALEPLVDLPIGINITRFQTLHRSYLTPGDSSSGWTAGAAAYYVGYLQPRTFLLKYNENGTITDAVDCALDPLSETKCTLKSFTVEKGIYQTSNFRVQPTESIVRFPNITNLCPFGEVFNATRFASVYAWNRKRISNCVADYSVLYNSASFSTFKCYGVSPTKLNDLCFTNVYADSFVIRGDEVRQIAPGQTGNIADYNYKLPDDFTGCVIAWNSNNLDSKVGGNYNYLYRLFRKSNLKPFERDISTEIYQAGSTPCNGVKGFNCYFPLQSYGFQPTYGVGYQPYRVVVLSFELLHAPATVCGPKKSTNLVKNKCVNFNFNGLTGTGVLTESNKKFLPFQQFGRDIADTTDAVRDPQTLEILDITPCSFGGVSVITPGTNTSNQVAVLYQGVNCTEVPVAIHADQLTPTWRVYSTGSNVFQTRAGCLIGAEHVNNSYECDIPIGAGICASYQTQTNSPGSASSVASQSIIAYTMSLGVENSVAYSNNSIAIPTNFTISVTTEILPVSMTKTSVDCTMYICGDSTECSNLLLQYGSFCTQLNRALTGIAVEQDKNTQEVFAQVKQIYKTPPIKDFGGFNFSQILPDPSKPSKRSPIEDLLFNKVTLADAGFIKQYGDCLGDIAARDLICAQKFNGLTVLPPLLTDEMIAQYTSALLAGTITSGWTFGAGPALQIPFPMQMAYRFNGIGVTQNVLYENQKLIANQFNSAIGKIQDSLSSTPSALGKLQDVVNQNAQALNTLVKQLSSNFGAISSVLNDILSRLDPPEAEVQIDRLITGRLQSLQTYVTQQLIRAAEIRASANLAATKMSECVLGQSKRVDFCGKGYHLMSFPQSAPHGVVFLHVTYVPAQEKNFTTAPAICHDGKAHFPREGVFVSNGTHWFVTQRNFYEPQIITTDNTFVSGNCDVVIGIVNNTVYDPLQPELDSFKEELDKYFKNHTSPDVDLGDISGINASVVNIQKEIDRLNEVAKNLNESLIDLQELGKYGSGSGSGSGSGSGSGSGSGSGSGSMQWNSSTFHQALLDPRVRGLYFPAGGSSSGTVNPVPTTASPISSIFSRTGDPAPNMESTTSGFLGPLLALQAGFFLLTRILTIPQSLDSWWTSLNFLGGAPTCPGQNLQSPTSNHSPTSCPPICPGYRWMCLRRFIIFLFILLLCLIFLLVLLDYQGMLPVCPLLPGTSTTSTGPCKTCTIPAQGTSMFPSCCCTKPSDGNCTCIPIPSSWAFARFLWEWASVRFSWLSLLVPFVQWFVGLSPTVWLSVIWMMWYWGPSLYNILNPFLPLLPIFFCLWVYI

SEQ ID NO: 168 - protein, 1511 aa, synthetic construct
  REGION 1..1511: note = Recombinant Sequence
MFVFLVLLPLVSSQCVNFTNRTQLPSAYTNSFTRGVYYPDKVFRSSVLHSTQDLFLPFFSNVTWFHAIHVSGTNGTKRFDNPVLPFNDGVYFASTEKSNIIRGWIFGTTLDSKTQSLLIVNNATNVVIKVCEFQFCNYPFLGVYYHKNNKSWMESEFRVYSSANNCTFEYVSQPFLMDLEGKQGNFKNLSEFVFKNIDGYFKIYSKHTPINLVRDLPQGFSALEPLVDLPIGINITRFQTLLALHRSYLTPGDSSSGWTAGAAAYYVGYLQPRTFLLKYNENGTITDAVDCALDPLSETKCTLKSFTVEKGIYQTSNFRVQPTESIVRFPNITNLCPFGEVFNATRFASVYAWNRKRISNCVADYSVLYNSASFSTFKCYGVSPTKLNDLCFTNVYADSFVIRGDEVRQIAPGQTGTIADYNYKLPDDFTGCVIAWNSNNLDSKVGGNYNYLYRLFRKSNLKPFERDISTEIYQAGSTPCNGVKGFNCYFPLQSYGFQPTYGVGYQPYRVVVLSFELLHAPATVCGPKKSTNLVKNKCVNFNFNGLTGTGVLTESNKKFLPFQQFGRDIADTTDAVRDPQTLEILDITPCSFGGVSVITPGTNTSNQVAVLYQGVNCTEVPVAIHADQLTPTWRVYSTGSNVFQTRAGCLIGAEYVNNSYECDIPIGAGICASYQTQTNSPGSASSVASQSIIAYTMSLGAENSVAYSNNSIAIPTNFTISVTTEILPVSMTKTSVDCTMYICGDSTECSNLLLQYGSFCTQLNRALTGIAVEQDKNTQEVFAQVKQIYKTPPIKDFGGFNFSQILPDPSKPSKRSPIEDLLFNKVTLADAGFIKQYGDCLGDIAARDLICAQKFNGLTVLPPLLTDEMIAQYTSALLAGTITSGWTFGAGPALQIPFPMQMAYRFNGIGVTQNVLYENQKLIANQFNSAIGKIQDSLSSTPSALGKLQDVVNQNAQALNTLVKQLSSNFGAISSVLNDILSRLDPPEAEVQIDRLITGRLQSLQTYVTQQLIRAAEIRASANLAAIKMSECVLGQSKRVDFCGKGYHLMSFPQSAPHGVVFLHVTYVPAQEKNFTTAPAICHDGKAHFPREGVFVSNGTHWFVTQRNFYEPQIITTDNTFVSGNCDVVIGIVNNTVYDPLQPELDSFKEELDKYFKNHTSPDVDLGDISGINASFVNIQKEIDRLNEVAKNLNESLIDLQELGKYGSGSGSGSGSGSGSGSGSGSGSGSMQWNSSTFHQALLDPRVRGLYFPAGGSSSGTVNPVPTTASPISSIFSRTGDPAPNMESTTSGFLGPLLALQAGFFLLTRILTIPQSLDSWWTSLNFLGGAPTCPGQNLQSPTSNHSPTSCPPICPGYRWMCLRRFIIFLFILLLCLIFLLVLLDYQGMLPVCPLLPGTSTTSTGPCKTCTIPAQGTSMFPSCCCTKPSDGNCTCIPIPSSWAFARFLWEWASVRFSWLSLLVPFVQWFVGLSPTVWLSVIWMMWYWGPSLYNILNPFLPLLPIFFCLWVYI

SEQ ID NO: 169 - protein, 1511 aa, synthetic construct
  REGION 1..1511: note = Recombinant Sequence
MFVFLVLLPLVSSQCVNLTTRTQLPPAYTNSFTRGVYYPDKVFRSSVLHSTQDLFLPFFSNVTWFHAIHVSGTNGTKRFDNPVLPFNDGVYFASIEKSNIIRGWIFGTTLDSKTQSLLIVNNATNVVIKVCEFQFCNDPFLDVYYHKNNKSWMKSEFRVYSSANNCTFEYVSQPFLMDLEGKQGNFKNLREFVFKNIDGYFKIYSKHTPINLVRDLPQGFSALEPLVDLPIGINITRFQTLLALHRSYLTPGDSSSGWTAGAAAYYVGYLQPRTFLLKYNENGTITDAVDCALDPLSETKCTLKSFTVEKGIYQTSNFRVQPTESIVRFPNITNLCPFGEVFNATRFASVYAWNRKRISNCVADYSVLYNSASFSTFKCYGVSPTKLNDLCFTNVYADSFVIRGDEVRQIAPGQTGKIADYNYKLPDDFTGCVIAWNSNNLDSKVGGNYNYRYRLFRKSNLKPFERDISTEIYQAGSTPCNGVQGFNCYFPLQSYGFQPTNGVGYQPYRVVVLSFELLHAPATVCGPKKSTNLVKNKCVNFNFNGLTGTGVLTESNKKFLPFQQFGRDIADTTDAVRDPQTLEILDITPCSFGGVSVITPGTNTSNQVAVLYQGVNCTEVPVAIHADQLTPTWRVYSTGSNVFQTRAGCLIGAEHVNNSYECDIPIGAGICASYQTQTNSRGSASSVASQSIIAYTMSLGAENSVAYSNNSIAIPTNFTISVTTEILPVSMTKTSVDCTMYICGDSTECSNLLLQYGSFCTQLNRALTGIAVEQDKNTQEVFAQVKQIYKTPPIKDFGGFNFSQILPDPSKPSKRSPIEDLLFNKVTLADAGFIKQYGDCLGDIAARDLICAQKFNGLTVLPPLLTDEMIAQYTSALLAGTITSGWTFGAGPALQIPFPMQMAYRFNGIGVTQNVLYENQKLIANQFNSAIGKIQDSLSSTPSALGKLQDVVNQNAQALNTLVKQLSSNFGAISSVLNDILSRLDPPEAEVQIDRLITGRLQSLQTYVTQQLIRAAEIRASANLAATKMSECVLGQSKRVDFCGKGYHLMSFPQSAPHGVVFLHVTYVPAHEKNFTTAPAICHDGKAHFPREGVFVSNGTHWFVTQRNFYEPQIITTDNTFVSGNCDVVIGIVNNTVYDPLQPELDSFKEELDKYFKNHTSPDVDLGDISGINASVVNIQKEIDRLNEVAKNLNESLIDLQELGKYGSGSGSGSGSGSGSGSGSGSGSGSMQWNSSTFHQALLDPRVRGLYFPAGGSSSGTVNPVPTTASPISSIFSRTGDPAPNMESTTSGFLGPLLALQAGFFLLTRILTIPQSLDSWWTSLNFLGGAPTCPGQNLQSPTSNHSPTSCPPICPGYRWMCLRRFIIFLFILLLCLIFLLVLLDYQGMLPVCPLLPGTSTTSTGPCKTCTIPAQGTSMFPSCCCTKPSDGNCTCIPIPSSWAFARFLWEWASVRFSWLSLLVPFVQWFVGLSPTVWLSVIWMMWYWGPSLYNILNPFLPLLPIFFCLWVYI

SEQ ID NO: 170 - protein, 1504 aa, synthetic construct
  REGION 1..1504: note = Recombinant Sequence
MFVFLVLLPLVSSQCVNLTTRTQLPPAYTNSFTRGVYYPDKVFRSSVLHSTQDLFLPFFSNVTWFHAIHVSGTNVIKRFDNPVLPFNDGVYFASTEKSNIIRGWIFGTTLDSKTQSLLIVNNATNVVIKVCEFQFCNDPFLGVYYHKNNKSWMESEFRVYSSANNCTFEYVSQPFLMDLEGKQGNFKNLREFVFKNIDGYFKIYSKHTPINLVRDLPQGFSALEPLVDLPIGINITRFQTLLALHNSSSGWTAGAAAYYVGYLQPRTFLLKYNENGTITDAVDCALDPLSETKCTLKSFTVEKGIYQTSNFRVQPTESIVRFPNITNLCPFGEVFNATRFASVYAWNRKRISNCVADYSVLYNSASFSTFKCYGVSPTKLNDLCFTNVYADSFVIRGDEVRQIAPGQTGKIADYNYKLPDDFTGCVIAWNSNNLDSKVGGNYNYQYRLFRKSNLKPFERDISTEIYQAGSTPCNGVEGFNCYSPLQSYGFQPTNGVGYQPYRVVVLSFELLHAPATVCGPKKSTNLVKNKCVNFNFNGLTGTGVLTESNKKFLPFQQFGRDIADTTDAVRDPQTLEILDITPCSFGGVSVITPGTNTSNQVAVLYQGVNCTEVPVAIHADQLTPTWRVYSTGSNVFQTRAGCLIGAEHVNNSYECDIPIGAGICASYQTQTNSPGSASSVASQSIIAYTMSLGAENSVAYSNNSIAIPTNFTISVTTEILPVSMTKTSVDCTMYICGDSTECSNLLLQYGSFCTQLNRALTGIAVEQDKNTQEVFAQVKQIYKTPPIKDFGGFNFSQILPDPSKPSKRSPIEDLLFNKVTLADAGFIKQYGDCLGDIAARDLICAQKFNGLNVLPPLLTDEMIAQYTSALLAGTITSGWTFGAGPALQIPFPMQMAYRFNGIGVTQNVLYENQKLIANQFNSAIGKIQDSLSSTPSALGKLQDVVNQNAQALNTLVKQLSSNFGAISSVLNDILSRLDPPEAEVQIDRLITGRLQSLQTYVTQQLIRAAEIRASANLAATKMSECVLGQSKRVDFCGKGYHLMSFPQSAPHGVVFLHVTYVPAQEKNFTTAPAICHDGKAHFPREGVFVSNGTHWFVTQRNFYEPQIITTDNTFVSGNCDVVIGIVNNTVYDPLQPELDSFKEELDKYFKNHTSPDVDLGDISGINASVVNIQKEIDRLNEVAKNLNESLIDLQELGKYGSGSGSGSGSGSGSGSGSGSGSGSMQWNSSTFHQALLDPRVRGLYFPAGGSSSGTVNPVPTTASPISSIFSRTGDPAPNMESTTSGFLGPLLALQAGFFLLTRILTIPQSLDSWWTSLNFLGGAPTCPGQNLQSPTSNHSPTSCPPICPGYRWMCLRRFIIFLFILLLCLIFLLVLLDYQGMLPVCPLLPGTSTTSTGPCKTCTIPAQGTSMFPSCCCTKPSDGNCTCIPIPSSWAFARFLWEWASVRFSWLSLLVPFVQWFVGLSPTVWLSVIWMMWYWGPSLYNILNPFLPLLPIFFCLWVYI

SEQ ID NO: 171 - protein, 1503 aa, synthetic construct
  REGION 1..1503: note = Recombinant Sequence
MFVFLVLLPLVSSQCVNLTTRTQLPPAYTNSFTRGVYYPDKVFRSSVLHSTQDLFLPFFSNVTWFHAIHVSGTNVIKRFDNPVLPFNDGVYFASTEKSNIIRGWIFGTTLDSKTQSLLIVNNATNVVIKVCEFQFCNDPFLGVYYHKNNKSWMESEFRVYSSANNCTFEYVSQPFLMDLEGKQGNFKNLREFVFKNIDGYFKIYSKHTPINLVRDLPQGFSALEPLVDLPIGINITRFQTLLALHSSSGWTAGAAAYYVGYLQPRTFLLKYNENGTITDAVDCALDPLSETKCTLKSFTVEKGIYQTSNFRVQPTESIVRFPNITNLCPFGEVFNATRFASVYAWNRKRISNCVADYSVLYNSASFSTFKCYGVSPTKLNDLCFTNVYADSFVIRGDEVRQIAPGQTGKIADYNYKLPDDFTGCVIAWNSNNLDSKVGGNYNYQYRLFRKSNLKPFERDISTEIYQAGSTPCNGVEGFNCYSPLQSYGFQPTNGVGYQPYRVVVLSFELLHAPATVCGPKKSTNLVKNKCVNFNFNGLTGTGVLTESNKKFLPFQQFGRDIADTTDAVRDPQTLEILDITPCSFGGVSVITPGTNTSNQVAVLYQGVNCTEVPVAIHADQLTPTWRVYSTGSNVFQTRAGCLIGAEHVNNSYECDIPIGAGICASYQTQTNSPGSASSVASQSIIAYTMSLGAENSVAYSNNSIAIPTNFTISVTTEILPVSMTKTSVDCTMYICGDSTECSNLLLQYGSFCTQLNRALTGIAVEQDKNTQEVFAQVKQIYKTPPIKDFGGFNFSQILPDPSKPSKRSPIEDLLFNKVTLADAGFIKQYGDCLGDIAARDLICAQKFNGLNVLPPLLTDEMIAQYTSALLAGTITSGWTFGAGPALQIPFPMQMAYRFNGIGVTQNVLYENQKLIANQFNSAIGKIQDSLSSTPSALGKLQDVVNQNAQALNTLVKQLSSNFGAISSVLNDILSRLDPPEAEVQIDRLITGRLQSLQTYVTQQLIRAAEIRASANLAATKMSECVLGQSKRVDFCGKGYHLMSFPQSAPHGVVFLHVTYVPAQEKNFTTAPAICHDGKAHFPREGVFVSNGTHWFVTQRNFYEPQIITTDNTFVSGNCDVVIGIVNNTVYDPLQPELDSFKEELDKYFKNHTSPDVDLGDISGINASVVNIQKEIDRLNEVAKNLNESLIDLQELGKYGSGSGSGSGSGSGSGSGSGSGSGSMQWNSSTFHQALLDPRVRGLYFPAGGSSSGTVNPVPTTASPISSIFSRTGDPAPNMESTTSGFLGPLLALQAGFFLLTRILTIPQSLDSWWTSLNFLGGAPTCPGQNLQSPTSNHSPTSCPPICPGYRWMCLRRFIIFLFILLLCLIFLLVLLDYQGMLPVCPLLPGTSTTSTGPCKTCTIPAQGTSMFPSCCCTKPSDGNCTCIPIPSSWAFARFLWEWASVRFSWLSLLVPFVQWFVGLSPTVWLSVIWMMWYWGPSLYNILNPFLPLLPIFFCLWVYI

SEQ ID NO: 172 - protein, 1511 aa, synthetic construct
  REGION 1..1511: note = Recombinant Sequence
MFVFLVLLPLVSSQCVNLTTRTQLPPAYTNSFTRGVYYPDKVFRSSVLHSTQDLFLPFFSNVTWFHAIHVSGTNGTKRFDNPVLPFNDGVYFASTEKSNIIRGWIFGTTLDSKTQSLLIVNNATNVVIKVCEFQFCNDPFLGVYYHKNNKSLMESEFRVYSSANNCTFEYVSQPFLMDLEGKQGNFKNLREFVFKNIDGYFKIYSKHTPINLVRDLPQGFSALEPLVDLPIGINITRFQTLLALHRSYLTPGDSSSGWTAGAAAYYVGYLQPRTFLLKYNENGTITDAVDCALDPLSETKCTLKSFTVEKGIYQTSNFRVQPTESIVRFPNITNLCPFGEVFNATRFASVYAWNRKRISNCVADYSVLYNSASFSTFKCYGVSPTKLNDLCFTNVYADSFVIRGDEVRQIAPGQTGKIADYNYKLPDDFTGCVIAWNSNNLDSKVGGNYNYLYRLFRKSNLKPFERDISTEIYQAGSTPCNGVKGFNCYFPLQSYGFQPTNGVGYQPYRVVVLSFELLHAPATVCGPKKSTNLVKNKCVNFNFNGLTGTGVLTESNKKFLPFQQFGRDIADTTDAVRDPQTLEILDITPCSFGGVSVITPGTNTSNQVAVLYQGVNCTEVPVAIHADQLTPTWRVYSTGSNVFQTRAGCLIGAEHVNNSYECDIPIGAGICASYQTQTNSPGSASSVASQSIIAYTMSLGAENSVAYSNNSIAIPTNFTISVTTEILPVSMTKTSVDCTMYICGDSTECSNLLLQYGSFCTQLNRALTVIAVEQDKNTQEVFAQVKQIYKTPPIKDFGGFNFSQILPDPSKPSKRSPIEDLLFNKVTLADAGFIKQYGDCLGDIAARDLICAQKFNGLTVLPPLLTDEMIAQYTSALLAGTITSGWTFGAGPALQIPFPMQMAYRFNGIGVTQNVLYENQKLIANQFNSAIGKIQDSLSSTPSALGKLQDVVNQNAQALNTLVKQLSSNFGAISSVLNDILSRLDPPEAEVQIDRLITGRLQSLQTYVTQQLIRAAEIRASANLAATKMSECVLGQSKRVDFCGKGYHLMSFPQSAPHGVVFLHVTYVPAQEKNFTTAPAICHDGKAHFPREGVFVSNGTHWFVTQRNFYEPQIITTDNTFVSGNCDVVIGIVNNTVYDPLQPELDSFKEELDKYFKNHTSPDVDLGDISGINASVVNIQKEIDRLNEVAKNLNESLIDLQELGKYGSGSGSGSGSGSGSGSGSGSGSGSMQWNSSTFHQALLDPRVRGLYFPAGGSSSGTVNPVPTTASPISSIFSRTGDPAPNMESTTSGFLGPLLALQAGFFLLTRILTIPQSLDSWWTSLNFLGGAPTCPGQNLQSPTSNHSPTSCPPICPGYRWMCLRRFIIFLFILLLCLIFLLVLLDYQGMLPVCPLLPGTSTTSTGPCKTCTIPAQGTSMFPSCCCTKPSDGNCTCIPIPSSWAFARFLWEWASVRFSWLSLLVPFVQWFVGLSPTVWLSVIWMMWYWGPSLYNILNPFLPLLPIFFCLWVYI

SEQ ID NO: 173 - protein, 1511 aa, synthetic construct
  REGION 1..1511: note = Recombinant Sequence
MFVFLVLLPLVSSQCVNLTTRTQLPPAYTNSFTRGVYYPDKVFRSSVLHSTQDLFLPFFSNVTWFHAIHVSGTNGTKRFDNPVLPFNDGVYFASTEKSNIIRGWIFGTTLDSKTQSLLIVNNATNVVIKVCEFQFCNDPFLGVYYHKNNKSWMESEFRVYSSANNCTFEYVSQPFLMDLEGKQGNFKNLREFVFKNIDGYFKIYSKHTPINLVRDLPQGFSALEPLVDLPIGINITRFQTLLALHRSYLTPGDSSSGWTAGAAAYYVGYLQPRTFLLKYNENGTITDAVDCALDPLSETKCTLKSFTVEKGIYQTSNFRVQPTESIVRFPNITNLCPFGEVFNATRFASVYAWNRKRISNCVADYSVLYNSASFSTFKCYGVSPTKLNDLCFTNVYADSFVIRGDEVRQIAPGQTGKIADYNYKLPDDFTGCVIAWNSNNLDSKVGGNYNYLYRLFRKSNLKPFERDISTEIYQAGSKPCNGVEGFNCYFPLQSYGFQPTNGVGYQPYRVVVLSFELLHAPATVCGPKKSTNLVKNKCVNFNFNGLTGTGVLTESNKKFLPFQQFGRDIADTTDAVRDPQTLEILDITPCSFGGVSVITPGTNTSNQVAVLYQGVNCTEVPVAIHADQLTPTWRVYSTGSNVFQTRAGCLIGAEHVNNSYECDIPIGAGICASYQTQTNSHGSASSVASQSIIAYTMSLGAENSVAYSNNSIAIPTNFTISVTTEILPVSMAKTSVDCTMYICGDSTECSNLLLQYGSFCTQLNRALTGIAVEQDKNTQEVFAQVKQIYKTPPIKDFGGFNFSQILPDPSKPSKRSPIEDLLFNKVTLADAGFIKQYGDCLGDIAARDLICAQKFNGLTVLPPLLTDEMIAQYTSALLAGTITSGWTFGAGPALQIPFPMQMAYRFNGIGVTQNVLYENQKLIANQFNSAIGKIQDSLSSTPSALGKLQDVVNQNAQALNTLVKQLSSNFGAISSVLNDILSRLDPPEAEVQIDRLITGRLQSLQTYVTQQLIRAAEIRASANLAATKMSECVLGQSKRVDFCGKGYHLMSFPQSAPHGVVFLHVTYVPAQEKNFTTAPAICHDGKAHFPREGVFVSNGTHWFVTQRNFYEPQIITTDNTFVSGNCDVVIGIVNNTVYDPLQPELDSFKEELDKYFKNHTSPDVDLGDISGINASVVNIQKEIDRLNEVAKNLNESLIDLQELGKYGSGSGSGSGSGSGSGSGSGSGSGSMQWNSSTFHQALLDPRVRGLYFPAGGSSSGTVNPVPTTASPISSIFSRTGDPAPNMESTTSGFLGPLLALQAGFFLLTRILTIPQSLDSWWTSLNFLGGAPTCPGQNLQSPTSNHSPTSCPPICPGYRWMCLRRFIIFLFILLLCLIFLLVLLDYQGMLPVCPLLPGTSTTSTGPCKTCTIPAQGTSMFPSCCCTKPSDGNCTCIPIPSSWAFARFLWEWASVRFSWLSLLVPFVQWFVGLSPTVWLSVIWMMWYWGPSLYNILNPFLPLLPIFFCLWVYI

SEQ ID NO: 174 - protein, 1508 aa, synthetic construct
  REGION 1..1508: note = Recombinant Sequence
MFVFLVLLPLVSSQCVNLTTRTQLPPAYTNSFTRGVYYPDKVFRSSVLHSTRDLFLPFFSNVTWFHVISGTNGTKRFDNPVLPFNDGVYFASTEKSNIIRGWIFGTTLDSKTQSLLIVNNATNVVIKVCEFQFCNDPFLGVYHKNNKSWMESEFRVYSSANNCTFEYVSQPFLMDLEGKQGNFKNLREFVFKNIDGYFKIYSKHTPINLVRDLPQGFSALEPLVDLPIGINITRFQTLLALHRSYLTPGDSSSGWTAGAAAYYVGYLQPRTFLLKYNENGTITDAVDCALDPLSETKCTLKSFTVEKGIYQTSNFRVQPTESIVRFPNITNLCPFGEVFNATRFASVYAWNRKRISNCVADYSVLYNSASFSTFKCYGVSPTKLNDLCFTNVYADSFVIRGDEVRQIAPGQTGKIADYNYKLPDDFTGCVIAWNSNNLDSKVGGNYNYLYRLFRKSNLKPFERDISTEIYQAGSTPCNGVKGFNCYFPLQSYGFQPTNGVGYQPYRVVVLSFELLHAPATVCGPKKSTNLVKNKCVNFNFNGLTGTGVLTESNKKFLPFQQFGRDIADTTDAVRDPQTLEILDITPCSFGGVSVITPGTNTSNQVAVLYQGVNCTEVPVAIHADQLTPTWRVYSTGSNVFQTRAGCLIGAEHVNNSYECDIPIGAGICASYQTHTNSPGSASSVASQSIIAYTMSLGAENSVAYSNNSIAIPTNFTISVTTEILPVSMTKTSVDCTMYICGDSTECSNLLLQYGSFCTQLNRALTGIAVEQDKNTQEVFAQVKQIYKTPPIKDFGGFNFSQILPDPSKPSKRSPIEDLLFNKVTLADAGFIKQYGDCLGDIAARDLICAQKFNGLTVLPPLLTDEMIAQYTSALLAGTITSGWTLGAGPALQIPFPMQMAYRFNGIGVTQNVLYENQKLIANQFNSAIGKIQDSLSSTPSALGKLQDVVNQNAQALNTLVKQLSSNFGAISSVLNDILSRLDPPEAEVQIDRLITGRLQSLQTYVTQQLIRAAEIRASANLAATKMSECVLGQSKRVDFCGKGYHLMSFPQSAPHGVVFLHVTYVPAQEKNFTTAPAICHDGKAHFPREGVFVSNGTHWFVTQRNFYEPQIITTDNTFVSGNCDVVIGIVNNTVYDPLQPELDSFKEELDKYFKNHTSPDVDLGDISGINASVVNIQKEIDRLNEVAKNLNESLIDLQELGKYGSGSGSGSGSGSGSGSGSGSGSGSMQWNSSTFHQALLDPRVRGLYFPAGGSSSGTVNPVPTTASPISSIFSRTGDPAPNMESTTSGFLGPLLALQAGFFLLTRILTIPQSLDSWWTSLNFLGGAPTCPGQNLQSPTSNHSPTSCPPICPGYRWMCLRRFIIFLFILLLCLIFLLVLLDYQGMLPVCPLLPGTSTTSTGPCKTCTIPAQGTSMFPSCCCTKPSDGNCTCIPIPSSWAFARFLWEWASVRFSWLSLLVPFVQWFVGLSPTVWLSVIWMMWYWGPSLYNILNPFLPLLPIFFCLWVYI

SEQ ID NO: 175 - protein, 1511 aa, synthetic construct
  REGION 1..1511: note = Recombinant Sequence
MFVFFVLLPLVSSQCVNLTTRTQLPPAYTNSFTRGVYYPDKVFRSSVLHSTQDLFLPFFSNVTWFHAIHVSGTNGTKRFDNPVLPFNDGVYFASIEKSNIIRGWIFGTTLDSKTQSLLIVNNATNVVIKVCEFQFCNDPFLGVYYHKNNKSWMESEFRVYSSANNCTFEYVSQPFLMDLEGKQGNFKNLREFVFKNIDGYFKIYSKHTPINLVRDLPQGFSALEPLVDLPIGINITRFQTLLALHRSYLTPGGSSSGWTAGAAAYYVGYLQPRTFLLKYNENGTITDAVDCALDPLSETKCTLKSFTVEKGIYQTSNFRVQPTESIVRFPNITNLCPFGEVFNATRFASVYAWNRKRISNCVADYSVLYNSASFSTFKCYGVSPTKLNDLCFTNVYADSFVIRGDEVRQIAPGQTGKIADYNYKLPDDFTGCVIAWNSNNLDSKVGGNYNYLYRLFRKSNLKPFERDISTEIYQAGSTPCNGVKGFNCYFPLQSYGFQPTNGVGYQPYRVVVLSFELLHAPATVCGPKKSTNLVKNKCVNFNFNGLTGTGVLTESNKKFLPFQQFGRDIADTTDAVRDPQTLEILDITPCSFGGVSVITPGTNTSNQVAVLYQGVNCTEVPVAIHADQLTPTWRVYSTGSNVFQTRAGCLIGAEHVNNSYECDIPIGAGICASYQTQTNSPGSASSVASQSIIAYTMSLGVENSVAYSNNSIAIPTNFTISVTTEILPVSMTKTSVDCTMYICGDSTECSNLLLQYGSFCTQLNRALTGIAVEQDKNTQEVFAQVKQIYKTPPIKDFGGFNFSQILPDPSKPSKRSPIEDLLFNKVTLADAGFIKQYGDCLGDIAARDLICAQKFNGLTVLPPLLTDEMIAQYTSALLAGTITSGWTFGAGPALQIPFPMQMAYRFNGIGVTQNVLYENQKLIANQFNSAIGKIQDSLSSTPSALGKLQDVVNQNAQALNTLVKQLSSNFGAISSVLNDILSRLDPPEAEVQIDRLITGRLQSLQTYVTQQLIRAAEIRASANLAATKMSECVLGQSKRVDFCGKGYHLMSFPQSAPHGVVFLHVTYVPAQEKNFTTAPAICHDGKAHFPREGVFVSNGTHWFVTQRNFYEPQIITTDNTFVSGNCDVVIGIVNNTVYDPLQPELDSFKEELDKYFKNHTSPDVDLGDISGINASVVNIQKEIDRLNEVAKNLNESLIDLQELGKYGSGSGSGSGSGSGSGSGSGSGSGSMQWNSSTFHQALLDPRVRGLYFPAGGSSSGTVNPVPTTASPISSIFSRTGDPAPNMESTTSGFLGPLLALQAGFFLLTRILTIPQSLDSWWTSLNFLGGAPTCPGQNLQSPTSNHSPTSCPPICPGYRWMCLRRFIIFLFILLLCLIFLLVLLDYQGMLPVCPLLPGTSTTSTGPCKTCTIPAQGTSMFPSCCCTKPSDGNCTCIPIPSSWAFARFLWEWASVRFSWLSLLVPFVQWFVGLSPTVWLSVIWMMWYWGPSLYNILNPFLPLLPIFFCLWVYI

SEQ ID NO: 176 - protein, 1511 aa, synthetic construct
  REGION 1..1511: note = Recombinant Sequence
MFVFLVLLPLVSIQCVNLTTRTQLPPAYTNSFTRGVYYPDKVFRSSVLHSTQDLFLPFFSNVTWFHAIHVSGTNGTKRFDNPVLPFNDGVYFASTEKSNIIRGWIFGTTLDSKTQSLLIVNNATNVVIKVCEFQFCNDPFLGVYYHKNNKSCMESEFRVYSSANNCTFEYVSQPFLMDLEGKQGNFKNLREFVFKNIDGYFKIYSKHTPINLVRDLPQGFSALEPLVDLPIGINITRFQTLLALHRSYLTPGDSSSGWTAGAAAYYVGYLQPRTFLLKYNENGTITDAVDCALDPLSETKCTLKSFTVEKGIYQTSNFRVQPTESIVRFPNITNLCPFGEVFNATRFASVYAWNRKRISNCVADYSVLYNSASFSTFKCYGVSPTKLNDLCFTNVYADSFVIRGDEVRQIAPGQTGKIADYNYKLPDDFTGCVIAWNSNNLDSKVGGNYNYRYRLFRKSNLKPFERDISTEIYQAGSTPCNGVEGFNCYFPLQSYGFQPTNGVGYQPYRVVVLSFELLHAPATVCGPKKSTNLVKNKCVNFNFNGLTGTGVLTESNKKFLPFQQFGRDIADTTDAVRDPQTLEILDITPCSFGGVSVITPGTNTSNQVAVLYQGVNCTEVPVAIHADQLTPTWRVYSTGSNVFQTRAGCLIGAEHVNNSYECDIPIGAGICASYQTQTNSPGSASSVASQSIIAYTMSLGAENSVAYSNNSIAIPTNFTISVTTEILPVSMTKTSVDCTMYICGDSTECSNLLLQYGSFCTQLNRALTGIAVEQDKNTQEVFAQVKQIYKTPPIKDFGGFNFSQILPDPSKPSKRSPIEDLLFNKVTLADAGFIKQYGDCLGDIAARDLICAQKFNGLTVLPPLLTDEMIAQYTSALLAGTITSGWTFGAGPALQIPFPMQMAYRFNGIGVTQNVLYENQKLIANQFNSAIGKIQDSLSSTPSALGKLQDVVNQNAQALNTLVKQLSSNFGAISSVLNDILSRLDPPEAEVQIDRLITGRLQSLQTYVTQQLIRAAEIRASANLAATKMSECVLGQSKRVDFCGKGYHLMSFPQSAPHGVVFLHVTYVPAQEKNFTTAPAICHDGKAHFPREGVFVSNGTHWFVTQRNFYEPQIITTDNTFVSGNCDVVIGIVNNTVYDPLQPELDSFKEELDKYFKNHTSPDVDLGDISGINASVVNIQKEIDRLNEVAKNLNESLIDLQELGKYGSGSGSGSGSGSGSGSGSGSGSGSMQWNSSTFHQALLDPRVRGLYFPAGGSSSGTVNPVPTTASPISSIFSRTGDPAPNMESTTSGFLGPLLALQAGFFLLTRILTIPQSLDSWWTSLNFLGGAPTCPGQNLQSPTSNHSPTSCPPICPGYRWMCLRRFIIFLFILLLCLIFLLVLLDYQGMLPVCPLLPGTSTTSTGPCKTCTIPAQGTSMFPSCCCTKPSDGNCTCIPIPSSWAFARFLWEWASVRFSWLSLLVPFVQWFVGLSPTVWLSVIWMMWYWGPSLYNILNPFLPLLPIFFCLWVYI

SEQ ID NO: 177 - protein, 1510 aa, synthetic construct
  REGION 1..1510: note = Recombinant Sequence
MFVFLVLLPLVSSQCVNLTTRTQLPPAYTNSFTRGVYYPDKVFRSSVLHSTQDLFLPFFSNVTWFHAIHVSGTNGTKRFGNPVLPFNDGVYFASTEKSNIIRGWIFGTTLDSKTQSLLIVNNATNVVIKVCEFQFCNDPFLGVYHKNNKSWMESESRVYSSANNCTFEYVSQPFLMDLEGKQGNFKNLREFVFKNIDGYFKIYSKHTPINLVRDLPQGFSALEPLVDLPIGINITRFQTLLALHRSYLTPGDSSSGWTAGAAAYYVGYLQPRTFLLKYNENGTITDAVDCALDPLSETKCTLKSFTVEKGIYQTSNFRVQPTESIVRFPNITNLCPFGEVFNATRFASVYAWNRKRISNCVADYSVLYNSASFSTFKCYGVSPTKLNDLCFTNVYADSFVIRGDEVRQIAPGQTGKIADYNYKLPDDFTGCVIAWNSNNLDSKVGGNYNYRYRLFRKSNLKPFERDISTEIYQAGSTPCNGVEGFNCYFPLQSYGFQPTNGVGYQPYRVVVLSFELLHAPATVCGPKKSTNLVKNKCVNFNFNGLTGTGVLTESNKKFLPFQQFGRDIADTTDAVRDPQTLEILDITPCSFGGVSVITPGTNTSNQVAVLYQGVNCTEVPVAIHADQLTPTWRVYSTGSNVFQTRAGCLIGAEHVNNSYECDIPIGAGICASYQTQTNSPGSASSVASQSIIAYTMSLGAENSVAYSNNSIAIPTNFTISVTTEILPVSMTKTSVDCTMYICGDSTECSNLLLQYGSFCTQLNRALTGIAVEQDKNTQEVFAQVKQIYKTPPIKDFGGFNFSQILPDPSKPSKRSPIEDLLFNKVTLADAGFIKQYGDCLGDIAARDLICAQKFNGLNVLPPLLTDEMIAQYTSALLAGTITSGWTFGAGPALQIPFPMQMAYRFNGIGVTQNVLYENQKLIANQFNSAIGKIQDSLSSTPSALGKLQHVVNQNAQALNTLVKQLSSNFGAISSVLNDILSRLDPPEAEVQIDRLITGRLQSLQTYVTQQLIRAAEIRASANLAATKMSECVLGQSKRVDFCGKGYHLMSFPQSAPHGVVFLHVTYVPAQEKNFTTAPAICHDGKAHFPREGVFVSNGTHWFVTQRNFYEPQIITTDNTFVSGNCDVVIGIVNNTVYDPLQPELDSFKEELDKYFKNHTSPDVDLGDISGINASVVNIQKEIDRLNEVAKNLNESLIDLQELGKYGSGSGSGSGSGSGSGSGSGSGSGSMQWNSSTFHQALLDPRVRGLYFPAGGSSSGTVNPVPTTASPISSIFSRTGDPAPNMESTTSGFLGPLLALQAGFFLLTRILTIPQSLDSWWTSLNFLGGAPTCPGQNLQSPTSNHSPTSCPPICPGYRWMCLRRFIIFLFILLLCLIFLLVLLDYQGMLPVCPLLPGTSTTSTGPCKTCTIPAQGTSMFPSCCCTKPSDGNCTCIPIPSSWAFARFLWEWASVRFSWLSLLVPFVQWFVGLSPTVWLSVIWMMWYWGPSLYNILNPFLPLLPIFFCLWVYI

SEQ ID NO: 178 - protein, 1511 aa, synthetic construct
  REGION 1..1511: note = Recombinant Sequence
MFVFLVLLPLVSSQCVNLTTRTQLPPAYTNSFTRGVYYPDKVFRSSVLHSTQDLFLPFFSNVTWFHAIHVSGTNGTKRFDNPVLPFNDGVYFASTEKSNIIRGWIFGTTLDSKTQSLLIVNNATNVVIKVCEFQFCNDPFLGVYYHKNNKSWMESEFRVYSSANNCTFEYVSQPFLMDLEGKQGNFKNLREFVFKNIDGYFKIYSKHTPINLVRDLPQGFSALEPLVDLPIGINITRFQTLLALHRSYLTPGDSSSGWTAGAAAYYVGYLQPRTFLLKYNENGTITDAVDCALDPLSETKCTLKSFTVEKGIYQTSNFRVQPTESIVRFPNITNLCPFGEVFNATRFASVYAWNRKRISNCVADYSVLYNSASFSTFKCYGVSPTKLNDLCFTNVYADSFVIRGDEVRQIAPGQTGKIADYNYKLPDDFTGCVIAWNSNNLDSKVGGNYNYLYRLFRKSNLKPFERDISTEIYQAGSTPCNGVKGFNCYFPLQSYGFQPTNGVGYQPYRVVVLSFELLHAPATVCGPKKSTNLVKNKCVNFNFNGLTGTGVLTESNKKFLPFQQFGRDIADTTDAVRDPQTLEILDITPCSFGGVSVITPGTNTSNQVAVLYQGVNCTEVPVAIHADQLTPTWRVYSTGSNVFQTRAGCLIGAEHVNNSYECDIPIGAGICASYQTQTNSPGSASSVASQSIIAYTMSLGAENSVAYSNNSIAIPTNFTISVTTEILPVSMTKTSVDCTMYICGDSTECSNLLLQYGSFCTQLNRALTGIAVEQDKNTQEVFAQVKQIYKTPPIKDFGGFNFSQILPDPSKPSKRSPIEDLLFNKVTLADAGFIKQYGDCLGDIAARDLICAQKFNGLTVLPPLLTDEMIAQYTSALLAGTITSGWTFGAGPALQIPFPMQMAYRFNGIGVTQNVLYENQKLIANQFNSAIGKIQDSLSSTPSALGKLQDVVNQNAQALNTLVKQLSSNFGAISSVLNDILSRLDPPEAEVQIDRLITGRLQSLQTYVTQQLIRAAEIRASANLAATKMSECVLGQSKRVDFCGKGYHLMSFPQSAPHGVVFLHVTYVPAQEKNFTTAPAICHDGKAHFPREGVFVSNGTHWFVTQRNFYEPQIITTDNTFVSGNCDVVIGIVNNTVYDPLQPELDSFKEELDKYFKNHTSPDVDLGDISGINASFVNIQKEIDRLNEVAKNLNESLIDLQELGKYGSGSGSGSGSGSGSGSGSGSGSGSMQWNSSTFHQALLDPRVRGLYFPAGGSSSGTVNPVPTTASPISSIFSRTGDPAPNMESTTSGFLGPLLALQAGFFLLTRILTIPQSLDSWWTSLNFLGGAPTCPGQNLQSPTSNHSPTSCPPICPGYRWMCLRRFIIFLFILLLCLIFLLVLLDYQGMLPVCPLLPGTSTTSTGPCKTCTIPAQGTSMFPSCCCTKPSDGNCTCIPIPSSWAFARFLWEWASVRFSWLSLLVPFVQWFVGLSPTVWLSVIWMMWYWGPSLYNILNPFLPLLPIFFCLWVYI

SEQ ID NO: 179 - protein, 1511 aa, synthetic construct
  REGION 1..1511: note = Recombinant Sequence
MFVFLVLLPLVSSQCVNLTTRTQLPPAYTNSFTRGVYYPDKVFRSSVLHSTQDLFLPFFSNVTWFHAIHVSGTNGTKRFDNPVLPFNDGVYFASTEKSNIIRGWIFGTTLDSKTQSLLIVNNATNVVIKVCEFQFCNDPFLGVYYHKNNKSWMESELRVYSSANNCTFEYVSQPFLMDLEGKQGNFKNLREFVFKNIDGYFKIYSKHTPINLVRDLPQGFSALEPLVDLPIGINITRFQTLLALHRSYLTPGDSSSGWTAGAAAYYVGYLQPRTFLLKYNENGTITDAVDCALDPLSETKCTLKSFTVEKGIYQTSNFRVQPTESIVRFPNITNLCPFGEVFNATRFASVYAWNRKRISNCVADYSFLYNSASFSTFKCYGVSPTKLNDLCFTNVYADSFVIRGDEVRQIAPGQTGKIADYNYKLPDDFTGCVIAWNSNNLDSKVGGNYNYLYRLFRKSNLKPFERDISTEIYQAGSTPCNGVEGFNCYFPLQSYGFQPTNGVGYQPYRVVVLSFELLHAPATVCGPKKSTNLVKNKCVNFNFNGLTGTGVLTESNKKFLPFQQFGRDIADTTDAVRDPQTLEILDITPCSFGGVSVITPGTNTSNQVAVLYHGVNCTEVPVAIHADQLTPTWRVYSTGSNVFQTRAGCLIGAEHVNNSYECDIPIGAGICASYQTQTNSRGSASSVASQSIIAYTMSLGAENSVAYSNNSIAIPTNFTISVTTEILPVSMTKTSVDCTMYICGDSTECSNLLLQYGSFCTQLNRALTGIAVEQDKNTQEVFAQVKQIYKTPPIKDFGGFNFSQILPDPSKPSKRSPIEDLLFNKVTLADAGFIKQYGDCLGDIAARDLICAQKFNGLTVLPPLLTDEMIAQYTSALLAGTITSGWTFGAGPALQIPFPMQMAYRFNGIGVTQNVLYENQKLIANQFNSAIGKIQDSLSSTPSALGKLQDVVNQNAQALNTLVKQLSSNFGAISSVLNDILSRLDPPEAEVQIDRLITGRLQSLQTYVTQQLIRAAEIRASANLAATKMSECVLGQSKRVDFCGKGYHLMSFPQSAPHGVVFLHVTYVPAQEKNFTTAPAICHDGKAHFPREGVFVSNGTHWFVTQRNFYEPQIITTDNTFVSGNCDVVIGIVNNTVYDPLQPELDSFKEELDKYFKNHTSPDVDLGDISGINASVVNIQKEIDRLNEVAKNLNESLIDLQELGKYGSGSGSGSGSGSGSGSGSGSGSGSMQWNSSTFHQALLDPRVRGLYFPAGGSSSGTVNPVPTTASPISSIFSRTGDPAPNMESTTSGFLGPLLALQAGFFLLTRILTIPQSLDSWWTSLNFLGGAPTCPGQNLQSPTSNHSPTSCPPICPGYRWMCLRRFIIFLFILLLCLIFLLVLLDYQGMLPVCPLLPGTSTTSTGPCKTCTIPAQGTSMFPSCCCTKPSDGNCTCIPIPSSWAFARFLWEWASVRFSWLSLLVPFVQWFVGLSPTVWLSVIWMMWYWGPSLYNILNPFLPLLPIFFCLWVYI

SEQ ID NO: 180 - protein, 1511 aa, synthetic construct
  REGION 1..1511: note = Recombinant Sequence
MFVFFVLLPLVSSQCVNLTTRTQLPPAYTNSFTRGVYYPDKVFRSSVLHSTQDLFLPFFSNVTWFHAIHVSGTNGTKRFDNPVLPFNDGVYFASIEKSNIIRGWIFGTTLDSKTQSLLIVNNATNVVIKVCEFQFCNDPFLGVYYHKNNKSWMESEFRVYSSANNCTFEYVSQPFLMDLEGKQGNFKNLREFVFKNIDGYFKIYSKHTPINLVRDLPQGFSALEPLVDLPIGINITRFQTLLALHRSYLTPGGSSSGWTAGAAAYYVGYLQPRTFLLKYNENGTITDAVDCALDPLSETKCTLKSFTVEKGIYQTSNFRVQPTESIVRFPNITNLCPFGEVFNATRFASVYAWNRKRISNCVADYSVLYNSASFSTFKCYGVSPTKLNDLCFTNVYADSFVIRGDEVRQIAPGQTGKIADYNYKLPDDFTGCVIAWNSNNLDSKVGGNYNYLYRLFRKSNLKPFERDISTEIYQAGNTPCNGVEGFNCYFPLQSYGFQPTNGVGYQPYRVVVLSFELLHAPATVCGPKKSTNLVKNKCVNFNFNGLTGTGVLTESNKKFLPFQQFGRDIADTTDAVRDPQTLEILDITPCSFGGVSVITPGTNTSNQVAVLYQGVNCTEVPVAIHADQLTPTWRVYSTGSNVFQTRAGCLIGAEHVNNSYECDIPIGAGICASYQTQTNSPGSASSVASQSIIAYTMSLGAENSVAYSNNSIAIPTNFTISVTTEILPVSMTKTSVDCTMYICGDSTECSNLLLQYGSFCTQLNRALTGIAVEQDKNTQEVFAQVKQIYKTPPIKDFGGFNFSQILPDPSKPSKRSPIEDLLFNKVTLADAGFIKQYGDCLGDIAARDLICAQKFNGLTVLPPLLTDEMIAQYTSALLAGTITSGWTFGAGPALQIPFPMQMAYRFNGIGVTQNVLYENQKLIANQFNSAIGKIQDSLSSTPSALGKLQDVVNQNARALNTLVKQLSSNFGAISSVLNDILSRLDPPEAEVQIDRLITGRLQSLQTYVTQQLIRAAEIRASANLAATKMSECVLGQSKRVDFCGKGYHLMSFPQSAPHGVVFLHVTYVPAQEKNFTTAPAICHDGKAHFPREGVFVSNGTHWFVTQRNFYEPQIITTDNTFVSGNCDVVIGIVNNTVYDPLQPELDSFKEELDKYFKNHTSPDVDLGDISGINASVVNIQKEIDRLNEVAKNLNESLIDLQELGKYGSGSGSGSGSGSGSGSGSGSGSGSMQWNSSTFHQALLDPRVRGLYFPAGGSSSGTVNPVPTTASPISSIFSRTGDPAPNMESTTSGFLGPLLALQAGFFLLTRILTIPQSLDSWWTSLNFLGGAPTCPGQNLQSPTSNHSPTSCPPICPGYRWMCLRRFIIFLFILLLCLIFLLVLLDYQGMLPVCPLLPGTSTTSTGPCKTCTIPAQGTSMFPSCCCTKPSDGNCTCIPIPSSWAFARFLWEWASVRFSWLSLLVPFVQWFVGLSPTVWLSVIWMMWYWGPSLYNILNPFLPLLPIFFCLWVYI

SEQ ID NO: 181 - protein, 1506 aa, synthetic construct
  REGION 1..1506: note = Recombinant Sequence
MFVFLVLLPLVSSQCVNLTTRTQLPPAYTNSFTRGVYYPDKVFRSSVLHSTQDLFLPFFSNVTWFHAIHVSGTNGTKRFDNPVLPFNDGVYFASTEKSNIIRGWIFGTTLDSKTQSLLIVNNATNVVIKVCEFQFCNDPFYYHKNNKSWMESEFRVYSSANNCTFEYVSQPFLMDLEGKQGNFKNLREFVFKNIDGYFKIYSKHTPINLVRDLPQGFSALEPLVDLPIGINITRFQTLLHRSYLTPGDSSSGWTAGAAACYVGYLQPRTFLLKYNENGTITDAVDCALDPLSETKCTLKSFTVEKGIYQTSNFRVQPTESIVRFPNITNLCPFGEVFNATRFASVYAWNRKRISNCVADYSVLYNSASFSTFKCYGVSPTKLNDLCFTNVYADSFVIRGDEVRQIAPGQTGKIADYNYKLPDDFTGCVIAWNSNNLDSKVGGNYNYLYRLFRKSNLKPFERDISTEIYQAGSTPCNGVKGFNCYFPLQSYGFQPTYGVGYQPYRVVVLSFELLHAPATVCGPKKSTNLVKNKCVNFNFNGLTGTGVLTESNKKFLPFQQFGRDIADTTDAVRDPQTLEILDITPCSFGGVSVITPGTNTSNQVAVLYQGVNCTEVPVAIHADQLTPTWRVYSTGSNVFQTRAGCLIGAEHVNNSYECDIPIGAGICASYQTQTNSHGSASSVASQSIIAYTMSLGAENSVAYSNNSIAIPTNFTISVTTEILPVSMTKTSVDCTMYICGDSTECSNLLLQYGSFCTQLNRALTGIAVEQDKNTQEVFAQVKQIYKTPPIKDFGGFNFSQILPDPSKPSKRSPIEDLLFNKVTLADAGFIKQYGDCLGDIAARDLICAQKFNGLTVLPPLLTDEMIAQYTSALLAGTITSGWTFGAGPALQIPFPMQMAYRFNGIGVTQNVLYENQKLIANQFNSAIGKIQDSLSSTPSALGKLQDVVNQNAQALNTLVKQLSSNFGAISSVLNDILSRLDPPEAEVQIDRLITGRLQSLQTYVTQQLIRAAEIRASANLAATKMSECVLGQSKRVDFCGKGYHLMSFPQSAPHGVVFLHVTYVPAQEKNFTTAPAICHDGKAHFPRKGVFVSNGTYWFVTQRNFYEPQIITTDNTFVSGNCDVVIGIVNNTVYDPLQPELDSFKEELDKYFKNHTSPDVDLGDISGINASFVNIQKEIDRLNEVAKNLNESLIDLQELGKYGSGSGSGSGSGSGSGSGSGSGSGSMQWNSSTFHQALLDPRVRGLYFPAGGSSSGTVNPVPTTASPISSIFSRTGDPAPNMESTTSGFLGPLLALQAGFFLLTRILTIPQSLDSWWTSLNFLGGAPTCPGQNLQSPTSNHSPTSCPPICPGYRWMCLRRFIIFLFILLLCLIFLLVLLDYQGMLPVCPLLPGTSTTSTGPCKTCTIPAQGTSMFPSCCCTKPSDGNCTCIPIPSSWAFARFLWEWASVRFSWLSLLVPFVQWFVGLSPTVWLSVIWMMWYWGPSLYNILNPFLPLLPIFFCLWVYI

SEQ ID NO: 182 - protein, 1511 aa, synthetic construct
  REGION 1..1511: note = Recombinant Sequence
MFVFLVLLPLVSSQCVNFTTRTQLPPAYTNSFTRGVYYPDKVFRSSVLHSTQDLFLPFFSNVTWFHAIHVSGTNGTKRFDNPVLPFNDGVYFASTEKSNIIRGWIFGTTLDSKTQSLLIVNNATNVVIKVCEFQFCNDPFLGVYYHKNNKSWMESEFRVYSSANNCTFEYVSQPFLMDLEGKQGNFKNLREFVFKNIDGYFKIYSKHTPINLVRDLPQGFSALEPLVDLPIGINITRFQTLLALHRSYLTPGDSSSGWTAGAAAYYVGYLQPRTFLLKYNENGTITDAVDCALDPLSETKCTLKSFTVEKGIYQTSNFRVQPTESIVRFPNITNLCPFGEVFNATRFASVYAWNRKRISNCVADYSVLYNSASFSTFKCYGVSPTKLNDLCFTNVYADSFVIRGDEVRQIAPGQTGKIADYNYKLPDDFTGCVIAWNSNNLDSKVGGNYNYRYRLFRKSNLKPFERDISTEIYQAGSTPCNGVEGFNCYFPLQSYGFQPTYGVGYQPYRVVVLSFELLHAPATVCGPKKSTNLVKNKCVNFNFNGLTGTGVLTESNKKFLPFQQFGRDIADTTDAVRDPQTLEILDITPCSFGGVSVITPGTNTSNQVAVLYQGVNCTEVPVAIHADQLTPTWRVYSTGSNVFQTRAGCLIGVEYVNNSYECDIPIGAGICASYQTQTNSPGSASSVASQSIIAYTMSLGAENSVAYSNNSIAIPTNFTISVTTEILPVSMTKTSVDCTMYICGDSTECSNLLLQYGSFCTQLNRALTGIAVEQDKNTQEVFAQVKQIYKTPPIKYFGGFNFSQILPDPSKPSKRSPIEDLLFNKVTLADAGFIKQYGDCLGDIAARDLICAQKFNGLTVLPPLLTDEMIAQYTSALLAGTITSGWTFGAGPALQIPFPMQMAYRFNGIGVTQNVLYENQKLIANQFNSAIGKIQDSLSSTPSALGKLQDVVNQNAQALNTLVKQLSSNFGAISSVLNDILSRLDPPEAEVQIDRLITGRLQSLQTYVTQQLIRAAEIRASANLAATKMSECVLGQSKRVDFCGKGYHLMSFPQSAPHGVVFLHVTYVPAQEKNFTTAPAICHDGKAHFPREGVFVSNGTHWFVTQRNFYEPQIITTDNTFVSGNCDVVIGIVNNTVYDPLQPELDSFKEELDKYFKNHTSPDVDLGDISGINASVVNIQKEIDRLNEVAKNLNESLIDLQELGKYGSGSGSGSGSGSGSGSGSGSGSGSMQWNSSTFHQALLDPRVRGLYFPAGGSSSGTVNPVPTTASPISSIFSRTGDPAPNMESTTSGFLGPLLALQAGFFLLTRILTIPQSLDSWWTSLNFLGGAPTCPGQNLQSPTSNHSPTSCPPICPGYRWMCLRRFIIFLFILLLCLIFLLVLLDYQGMLPVCPLLPGTSTTSTGPCKTCTIPAQGTSMFPSCCCTKPSDGNCTCIPIPSSWAFARFLWEWASVRFSWLSLLVPFVQWFVGLSPTVWLSVIWMMWYWGPSLYNILNPFLPLLPIFFCLWVYI

SEQ ID NO: 183 - protein, 1511 aa, synthetic construct
  REGION 1..1511: note = Recombinant Sequence
MFVFLVLLPLVSSQCVNLTTRTQLPPAYTNSFTRGVYYPDKVFRSSVLHSTQDLFLPFFSNVTWFHAIHVSGTNGTKRFDNPVLPFNDGVYFASTEKSNIIRGWIFGTTLDSKTQSLLIVNNATNVVIKVCEFQFCNDPFLGVYYHKNNKSWMESEFRVYSSANNCTFEYVSQPFLMDLEGKQGNFKNLREFVFKNIDGYFKIYSKHTPINLVRDLPQGFSALEPLVDLPIGINITRFQTLLALHRSYLTPGDSSSGWTAGAAAYYVGYLQPRTFLLKYNENGTITDAVDCALDPLSETKCTLKSFTVEKGIYQTSNFRVQPTESIVRFPNITNLCPFGEVFNATRFASVYAWNRKRISNCVADYSVLYNSASFSTFKCYGVSPTKLNDLCFTNVYADSFVIRGDEVRQIAPGQTGKIADYNYKLPDDFTGCVIAWNSNNLDSKVGGNYNYLYRLFRKSNLKPFERDISTEIYQAGSTPCNGVEGFNCYFPLQSYGFQPTTGVGYQPYRVVVLSFELLHAPATVCGPKKSTNLVKNKCVNFNFNGLTGTGVLTESNKKFLPFQQFGRDIADTTDAVRDPQTLEILDITPCSFGGVSVITPGTNTSNQVAVLYQDVNCTEVPVAIHADQLTPTWRVYSTGSNVFQTRAGCLIGAEHVNNSYECDIPIGAGICASYQTQTNSPGSASSVASQSIIAYTMSLGAENSVAYSNNSIAIPTNFTISVTTEILPVSMTKTSVDCTMYICGDSTECSNLLLQYGSFCTQLNRALTGIAVEQDKNTQEVFAQVKQIYKTPPIKDFGGFNFSQILPDPSKPSKRSPIEDLLFNKVTLADAGFIKQYGDCLGDIAARDLICAQKFNGLTVLPPLLTDEMIAQYTSALLAGTITSGWTFGAGPALQIPFPMQMAYRFNGIGVTQNVLYENQKLIANQFNSAIGKIQDSLSSTPSALGKLQDVVNQNAQALNTLVKQLSSNFGAISSVLNDILSRLDPPEAEVQIDRLITGRLQSLQTYVTQQLIRAAEIRASANLAATKMSECVLGQSKRVDFCGKGYHLMSFPQSAPHGVVFLHVTYVPAQEKNFTTAPAICHDGKAHFPREGVFVSNGTHWFVTQRNFYEPQIITTDNTFVSGNCDVVIGIVNNTVYDPLQPELDSFKEELDKYFKNHTSPDVDLGDISGINASVVNIQKEIDRLNEVAKNLNESLIDLQELGKYGSGSGSGSGSGSGSGSGSGSGSGSMQWNSSTFHQALLDPRVRGLYFPAGGSSSGTVNPVPTTASPISSIFSRTGDPAPNMESTTSGFLGPLLALQAGFFLLTRILTIPQSLDSWWTSLNFLGGAPTCPGQNLQSPTSNHSPTSCPPICPGYRWMCLRRFIIFLFILLLCLIFLLVLLDYQGMLPVCPLLPGTSTTSTGPCKTCTIPAQGTSMFPSCCCTKPSDGNCTCIPIPSSWAFARFLWEWASVRFSWLSLLVPFVQWFVGLSPTVWLSVIWMMWYWGPSLYNILNPFLPLLPIFFCLWVYI

SEQ ID NO: 184 - protein, 1511 aa, synthetic construct
  REGION 1..1511: note = Recombinant Sequence
MFVFFVLLPLVSSQCVNLTTRTQLPPAYTNSFTRGVYYPDKVFRSSVLHSTQDLFLPFFSNVTWFHAIHVSGTNGTKRFDNPVLPFNDGVYFASIEKSNIIRGWIFGTTLDSKTQSLLIVNNATNVVIKVCEFQFCNDPFLGVYYHKNNKSWMESEFRVYSSANNCTFEYVSQPFLMDLEGKQGNFKNLREFVFKNIDGYFKIYSKHTPINLVRDLPQGFSALEPLVDLPIGINITRFQTLLALHRSYLTPGGSSSGWTAGAAAYYVGYLQPRTFLLKYNENGTITDAVDCALDPLSETKCTLKSFTVEKGIYQTSNFRVQPTESIVRFPNITNLCPFGEVFNATRFASVYAWNRKRISNCVADYSVLYNSASFSTFKCYGVSPTKLNDLCFTNVYADSFVIRGDEVRQIAPGQTGKIADYNYKLPDDFTGCVIAWNSNNLDSKVGGNYNYLYRLFRKSNLKPFERDISTEIYQAGSTPCNGVEGFNCYFPLQSYGFQPTNGVGYQPYRVVVLSFELLHAPATVCGPKKSTNLVKNKCVNFNFNGLTGTGVLTESNKKFLPFQQFGRDIADTTDAVRDPQTLEILDITPCSFGGVSVITPGTNTSNQVAVLYQGVNCTEVPVAIHADQLTPTWRVYSTGSNVFQTRAGCLIGAEHVNNSYECDIPIGAGICASYQTQTNSPGSASSVASQSIIAYTMSLGVENSVAYSNNSIAIPTNFTISVTTEILPVSMTKTSVDCTMYICGDSTECSNLLLQYGSFCTQLNRALTGIAVEQDKNTQEVFAQVKQIYKTPPIKDFGGFNFSQILPDPSKPSKRSPIEDLLFNKVTLADAGFIKQYGDCLGDIAARDLICAQKFNGLTVLPPLLTDEMIAQYTSALLAGTITSGWTFGAGPALQIPFPMQMAYRFNGIGVTQNVLYENQKLIANQFNSAIGKIQDSLSSTPSALGKLQDVVNQNAQALNTLVKQLSSNFGAISSVLNDILSRLDPPEAEVQIDRLITGRLQSLQTYVTQQLIRAAEIRASANLAATKMSECVLGQSKRVDFCGKGYHLMSFPQSAPHGVVFLHVTYVPAQEKNFTTAPAICHDGKAHFPREGVFVSNGTHWFVTQRNFYEPQIITTDNTFVSGNCDVVIGIVNNTVYDPLQPELDSFKEELDKYFKNHTSPDVDLGDISGINASVVNIQKEIDRLNEVAKNLNESLIDLQELGKYGSGSGSGSGSGSGSGSGSGSGSGSMQWNSSTFHQALLDPRVRGLYFPAGGSSSGTVNPVPTTASPISSIFSRTGDPAPNMESTTSGFLGPLLALQAGFFLLTRILTIPQSLDSWWTSLNFLGGAPTCPGQNLQSPTSNHSPTSCPPICPGYRWMCLRRFIIFLFILLLCLIFLLVLLDYQGMLPVCPLLPGTSTTSTGPCKTCTIPAQGTSMFPSCCCTKPSDGNCTCIPIPSSWAFARFLWEWASVRFSWLSLLVPFVQWFVGLSPTVWLSVIWMMWYWGPSLYNILNPFLPLLPIFFCLWVYI

SEQ ID NO: 185 - protein, 1511 aa, synthetic construct
  REGION 1..1511: note = Recombinant Sequence
MFVFLVLLPLVSSQCVNLTTRTQLPPAYTNSFTRGVYYPDKVFRSSVLHSTQDLFLPFFSNVTWFHAIHVSGTNGTKRFDNPVLPFNDGVYFASTEKSNIIRGWIFGTTLDSKTQSLLIVNNATNVVIKVCEFQFCNDPFLSVYYHKNNKSWMESEFRVYSSANNCTFEYVSQPFLMDLVGKQGNFKNLREFVFKNIDGYFKIYSKHTPINLVRDLPQGFSALEPLVDLPIGINITRFQTLLALHRSYLTPGDSSSGWTAGAAAYYVGYLQPRTFLLKYNENGTITDAVDCALDPLSETKCTLKSFTVEKGIYQTSNFRVQPTESIVRFPNITNLCPFGEVFNATRFASVYAWNRKRISNCVADYSVLYNSASFSTFKCYGVSPTKLNDLCFTNVYADSFVIRGDEVRQIAPGQTGKIADYNYKLPDDFTGCVIAWNSNNLDSKVGGNYNYLYRLFRKSNLKPFERDISTEIYQAGSTPCNGVEGFNCYFPLQSYGFQPTNGVGYQPYRVVVLSFELLHAPATVCGPKKSTNLVKNKCVNFNFNGLTGTGVLTESNKKFLPFQQFGRDIADTTDAVRDPQTLEILDITPCSFGGVSVITPGTNTSNQVAVLYQGVNCTEVPVAIHADQLTPTWRVYSTGSNVFQTRAGCLIGAEHVNNSYECDIPIGAGICASYQTHTNSPGSASSVASQSIIAYTMSLGAENSVAYSNNSIAIPTNFTISVTTEILPVSMTKTSVDCTMYICGDSTECSNLLLQYGSFCTQLNRALTGIAVEQDKNTQEVFAQVKQIYKTPPIKDFGGFNFSQILPDPSKPSKRSPIEDLLFNKVTLADAGFIKQYGDCLGDIAARDLICAQKFNGLTVLPPLLTDEMIAQYTSALLAGTITSGWTFGAGPALQIPFPMQMAYRFNGIGVTQNVLYENQKLIANQFNSAIGKIQDSLSSTPSALGKLQDVVNQNAQALNTLVKQLSSNFGAISSVLNDILSRLDPPEAEVQIDRLITGRLQSLQTYVTQQLIRAAEIRASANLAATKMSECVLGQSKRVDFCGKGYHLMSFPQSAPHGVVFLHVTYVPAQEKNFTTAPAICHDGKAHFPREGVFVSNGTHWFVTQRNFYEPQIITTDNTFVSGNCDVVIGIVNNTVYDPLQPELDSFKEELDKYFKNHTSPDVDLGDISGINASVVNIQKEIDRLNEVAKNLNESLIDLQELGKYGSGSGSGSGSGSGSGSGSGSGSGSMQWNSSTFHQALLDPRVRGLYFPAGGSSSGTVNPVPTTASPISSIFSRTGDPAPNMESTTSGFLGPLLALQAGFFLLTRILTIPQSLDSWWTSLNFLGGAPTCPGQNLQSPTSNHSPTSCPPICPGYRWMCLRRFIIFLFILLLCLIFLLVLLDYQGMLPVCPLLPGTSTTSTGPCKTCTIPAQGTSMFPSCCCTKPSDGNCTCIPIPSSWAFARFLWEWASVRFSWLSLLVPFVQWFVGLSPTVWLSVIWMMWYWGPSLYNILNPFLPLLPIFFCLWVYI

SEQ ID NO: 186 - protein, 1511 aa, synthetic construct
  REGION 1..1511: note = Recombinant Sequence
MFVFLVLLPLVSSQCVNLTTRTQLPPAYTNSFTRGVYYPDKVFRSSVLHSTQDLFLPFFSNVTWFHAIHVSGTNGTKRFDNPVLPFNDGVYFASTEKSNIIRGWIFGTTLDSKTQSLLIVNNATNVVIKVCEFQFCNDPFLGVYYHKNNKSWMESEFRVYSSANNCTFEYVSQPFLMDLEGKQGNFKNLREFVFKNIDGYFKIYSKHTPINLVRDLPQGFSALEPLVDLPIGINITRFQTLLALHRSYLTPGDSSSGWTAGAAAYYVGYLQPRTFLLKYNENGTITDAVDCALDPLSETKCTLKSFTVEKGIYQTSNFRVQPTESIVRFPNITNLCPFGEVFNATRFASVYAWNRKRISNCVADYSVLYNSASFSTFKCYGVSPTKLNDLCFTNVYADSFVIRGDEVRQIAPGQTGKIADYNYKLPDDFTGCVIAWNSNNLDSKVGGNYNYLYRLFRKSNLKPFERDISTEIYQAGSTPCNGVKGFNCYFPLQPYGFQPTYGVGYQPYRVVVLSFELLHAPATVCGPKKSTNLVKNKCVNFNFNGLTGTGVLTESNKKFLPFQQFGRDIADTTDAVRDPQTLEILDITPCSFGGVSVITPGTNTSNQVAVLYQGVNCTEVPVAIHADQLTPTWRVYSTGSNVFQTRAGCLIGAEHVNNSYECDIPIGAGICASYQTQTNSHGSASSVASQSIIAYTMSLGAENSVAYSNNSIAIPTNFTISVTTEILPVSMTKTSVDCTMYICGDSTECSNLLLQYGSFCTQLNRALTGIAVEQDKNTQEVFAQVKQIYKTPPIKDFGGFNFSQILPDPSKPSKRSPIEDLLFNKVTLADAGFIKQYGDCLGDIAARDLICAQKFNGLTVLPPLLTDEMIAQYTSALLAGTITSGWTFGAGPALQIPFPMQMAYRFNGIGVTQNVLYENQKLIANQFNSAIGKIQDSLSSTPSALGKLQDVVNQNAQALNTLVKQLSSNFGAISSVLNDILSRLDPPEAEVQIDRLITGRLQSLQTYVTQQLIRAAEIRASANLAATKMSECVLGQSKRVDFCGKGYHLMSFPQSAPHGVVFLHVTYVPAQEKNFTTAPAICHDGKAHFPREGVFVSNGTHWFVTQRNFYKPQIITTDNTFVSGNCDVVIGIVNNTVYDPLQPELDSFKEELDKYFKNHTSPDVDLGDISGINASVVNIQKEIDRLNEVAKNLNESLIDLQELGKYGSGSGSGSGSGSGSGSGSGSGSGSMQWNSSTFHQALLDPRVRGLYFPAGGSSSGTVNPVPTTASPISSIFSRTGDPAPNMESTTSGFLGPLLALQAGFFLLTRILTIPQSLDSWWTSLNFLGGAPTCPGQNLQSPTSNHSPTSCPPICPGYRWMCLRRFIIFLFILLLCLIFLLVLLDYQGMLPVCPLLPGTSTTSTGPCKTCTIPAQGTSMFPSCCCTKPSDGNCTCIPIPSSWAFARFLWEWASVRFSWLSLLVPFVQWFVGLSPTVWLSVIWMMWYWGPSLYNILNPFLPLLPIFFCLWVYI

SEQ ID NO: 187 - protein, 1510 aa, synthetic construct
  REGION 1..1510: note = Recombinant Sequence
MFVFLVLLPLVSSQCVNLTTRTQLPPAYTNSFTRGVYYPDKVFRSSVLHSTQDLFLPFFSNVTWFDAIHVSGTNGTKRFDNPVLPFNDGVYFASTEKSNIIRGWIFGTTLDSKTQSLLIVNNATNVVIKVCEFQFCNDPFLVVYHKNNKSWMESEFRVYSSANNCTFEYVSQPFLMDLEGKQGNFKNLREFVFKNIDGYFKIYSKHTPINLVRGLPQGFSALEPLVDLPIGINITRFQTLLALHRSYLTPGDSSSGWTAGAAAYYVGYLQPRTFLLKYNENGTITDAVDCALDPLSETKCTLKSFTVEKGIYQTSNFRVQPTESIVRFPNITNLCPFGEVFNATRFASVYAWNRKRISNCVADYSVLYNSASFSTFKCYGVSPTKLNDLCFTNVYADSFVIRGDEVRQIAPGQTGKIADYNYKLPDDFTGCVIAWNSNNLDSKVGGNYNYLYRLFRKSNLKPFERDISTEIYQAGSTPCNGAEGFNCYFPLQSYGFQPTNGVGYQPYRVVVLSFELLHAPATVCGPKKSTNLVKNKCVNFNFNGLTGTGVLTESNKKFLPFQQFGRDIADTTDAVRDPQTLEILDITPCSFGGVSVITPGTNTSNQVAVLYQDVNCTEVPVAIHADQLTPTWRVYSTGSNVFQTRAGCLIGAEYVNNSYECDIPIGASICASYQTQTNSPGSASSVASQSIIAYTMSLGAENSVAYSNNSIAIPTNFTISVTTEILPVSMTKTSVDCTMYICGDSTECSNLLLQYGSFCTQLNRALTGIAVEQDKNTQEVFAQVKQIYKTPPIKDFGGFNFSQILPDPSKPSKRSPIEDLLFNKVTLADAGFIKQYGDCLGDIAARDLICAQKFNGLTVLPPLLTDEMIAQYTSALLAGTITSGWTFGAGPALQIPFPMQMAYRFNGIGVTQNVLYENQKLIANQFNSAIGKIQDSLSSTPSALGKLRDVVNQNAQALNTLVKQLSSNFGAISSVLNDILSRLDPPEAEVQIDRLITGRLQSLQTYVTQQLIRAAEIRASANLAATKMSECVLGQSKRVDFCGKGYHLMSFPQSAPHGVVFLHVTYVPAQEKNFTTAPAICHDGKDHFPREGVFVSNGTHWFVTQRNFYEPQIITTDNTFVSGNCDVVIGIVNNTVYDPLQPELDSFKEELDKYFKNHTSPDVDLGDISGINASVVNIQKEIDRLNEVAKNLNESLIDLQELGKYGSGSGSGSGSGSGSGSGSGSGSGSMQWNSSTFHQALLDPRVRGLYFPAGGSSSGTVNPVPTTASPISSIFSRTGDPAPNMESTTSGFLGPLLALQAGFFLLTRILTIPQSLDSWWTSLNFLGGAPTCPGQNLQSPTSNHSPTSCPPICPGYRWMCLRRFIIFLFILLLCLIFLLVLLDYQGMLPVCPLLPGTSTTSTGPCKTCTIPAQGTSMFPSCCCTKPSDGNCTCIPIPSSWAFARFLWEWASVRFSWLSLLVPFVQWFVGLSPTVWLSVIWMMWYWGPSLYNILNPFLPLLPIFFCLWVYI

SEQ ID NO: 188 - protein, 1511 aa, synthetic construct
  REGION 1..1511: note = Recombinant Sequence
MFVFLVLLPLVSSQCVNLTTRTQLPPAYTNSFTRGVYYPDKVFRSSVLHSTQDLFLPFFSNVTWFHAIHVSGTNGTKRFDNPVLPFNDGVYFASTEKSNIIRGWIFGTTLDSKTQSLLIVNNATNVVIKVCEFQFCNDPFLGVYYHKNNKSWMESEFRVYSSANNCTFEYVSQPFLMDLEGKQGNFKNLREFVFKNIDGYFKIYSKHTPINLVRDLPQGFSALEPLVDLPIGINITRFQTLLALHRSYLTPGDSSSGWTAGAAAYYVGYLQPRTFLLKYNENGTITDAVDCALDPLSETKCTLKSFTVEKGIYQTSNFRVQPTESIVRFPNITNLCPFGEVFNATRFASVYAWNRKRISNCVADYSVLYNSASFSTFKCYGVSPTKLNDLCFTNVYADSFVIRGDEVRQIAPGQTGKIADYNYKLPDDFTGCVIAWNSNNLDSKVGGNYNYLYRLFRKSNLKPFERDISTEIYQAGSTPCNGVEGFNCYFPLQPYGFQPTNGVGYQPYRVVVLSFELLHAPATVCGPKKSTNLVKNKCVNFNFNGLTGTGVLTESNKKFLPFQQFGRDIADTTDAVRDPQTLEILDITPCSFGGVSVITPGTNTSNQVAVLYQGVNCTEVPVAIHADQLTPTWRVYSTGSNVFQTRAGCLIGAEHVNNSYECDIPIGAGICASYQTQTNSHGSASSVASQSIIAYTMSLGAENSVAYSNNSIAIPINFTISVTTEILPVSMTKTSVDCTMYICGDSTECSNLLLQYGSFCTQLNRALTGIAVEQDKNTQEVFAQVKQIYKTPPIKDFGGFNFSQILPDPSKPSKRSPIEDLLFNKVTLADAGFIKQYGDCLGDIAARDLICAQKFNGLTVLPPLLTDEMIAQYTSALLAGTITSGWTFGAGPALQIPFPMQMAYRFNGIGVTQNVLYENQKLIANQFNSAIGKIQDSLSSTPSALGKLQDVVNQNAQALNTLVKQLSSNFGAISSVLNDILSRLDPPEAEVQIDRLITGRLQSLQTYVTQQLIRAAEIRASANLAATKMSECVLGQSKRVDFCGKGYHLMSFPQSAPHGVVFLHVTYVPAQEKNFTTAPAICHDGKAHFPREGVFVSNGTHWFVTQRNFYEPQIITTDNTFVSGNCDVVIGIVNNTVYDPLQPELDSFKEELDKYFKNHTSPDVDLGDISGINASVVNIQKEIDRLNEVAKNLNESLIDLQELGKYGSGSGSGSGSGSGSGSGSGSGSGSMQWNSSTFHQALLDPRVRGLYFPAGGSSSGTVNPVPTTASPISSIFSRTGDPAPNMESTTSGFLGPLLALQAGFFLLTRILTIPQSLDSWWTSLNFLGGAPTCPGQNLQSPTSNHSPTSCPPICPGYRWMCLRRFIIFLFILLLCLIFLLVLLDYQGMLPVCPLLPGTSTTSTGPCKTCTIPAQGTSMFPSCCCTKPSDGNCTCIPIPSSWAFARFLWEWASVRFSWLSLLVPFVQWFVGLSPTVWLSVIWMMWYWGPSLYNILNPFLPLLPIFFCLWVYI

SEQ ID NO: 189 - protein, 1519 aa, synthetic construct
  REGION 1..1519: note = Recombinant Sequence
MFVFLVLLPLVSSQCVNLTTRTQLPPAYTNSFTRGVYYPDKVFRSSVLHSTQDLFLPFFSNVTWFHAIHVSGTNGTKRFDNPVLPFNDGVYFASTEKSNIIRGWIFGTTLDSKTQSLLIVNNATNVVIKVCEFQFCNDPFLGVYYHKNNKSWMESEFRVYSSANNCTFEYVSQPFLMDLEGKQGNFKNLREFVFKNIDGYFKIYSKHTPINLVRDLPQGFSALEPLVDLPIGINITRFQTLLALHRSYLTPGDSSSGWTAGAAAYYVGYLQPRTFLLKYNENGTITDAVDCALDPLSETKCTLKSFTVEKGIYQTSNFRVQPTESIVRFPNITNLCPFGEVFNATRFASVYAWNRKRISNCVADYSVLYNSASFSTFKCYGVSPTKLNDLCFTNVYADSFVIRGDEVRQIAPGQTGKIADYNYKLPDDFTGCVIAWNSNNLDSKVGGNYNYLYRLFRKSNLKPFERDISTEIYQAGSTPCNGVEGFNCYFPLQSYGFQPTNGVGYQPYRVVVLSFELLHAPATVCGPKKSTNLVKNKCVNFNFNGLTGTGVLTESNKKFLPFQQFGRDIADTTDAVRDPQTLEILDITPCSFGGVSVITPGTNTSNQVAVLYQDVNCTEVPVAIHADQLTPTWRVYSTGSNVFQTRAGCLIGAEHVNNSYECDIPIGAGICASYQTQTNSPGSASSVASQSIIAYTMSLGAENSVAYSNNSIAIPTNFTISVTTEILPVSMTKTSVDCTMYICGDSTECSNLLLQYGSFCTQLNRALTGIAVEQDKNTQEVFAQVKQIYKTPPIKDFGGFNFSQILPDPSKPSKRSPIEDLLFNKVTLADAGFIKQYGDCLGDIAARDLICAQKFNGLTVLPPLLTDEMIAQYTSALLAGTITSGWTFGAGPALQIPFPMQMAYRFNGIGVTQNVLYENQKLIANQFNSAIGKIQDSLSSTPSALGKLQDVVNQNAQALNTLVKQLSSNFGAISSVLNDILSRLDPPEAEVQIDRLITGRLQSLQTYVTQQLIRAAEIRASANLAATKMSECVLGQSKRVDFCGKGYHLMSFPQSAPHGVVFLHVTYVPAQEKNFTTAPAICHDGKAHFPREGVFVSNGTHWFVTQRNFYEPQIITTDNTFVSGNCDVVIGIVNNTVYDPLQPELDSFKEELDKYFKNHTSPDVDLGDISGINASVVNIQKEIDRLNEVAKNLNESLIDLQELGKYGSGSGSGSGSGSGSGSGSGSGSGSGSGSGSGSMQWNSSTFHQALLDPRVRGLYFPAGGSSSGTVNPVPTTASPISSIFSRTGDPAPNMESTTSGFLGPLLALQAGFFLLTRILTIPQSLDSWWTSLNFLGGAPTCPGQNLQSPTSNHSPTSCPPICPGYRWMCLRRFIIFLFILLLCLIFLLVLLDYQGMLPVCPLLPGTSTTSTGPCKTCTIPAQGTSMFPSCCCTKPSDGNCTCIPIPSSWAFARFLWEWASVRFSWLSLLVPFVQWFVGLSPTVWLSVIWMMWYWGPSLYNILNPFLPLLPIFFCLWVYI

SEQ ID NO: 190 - protein, 1517 aa, synthetic construct
  REGION 1..1517: note = Recombinant Sequence
MFVFLVLLPLVSSQCVNLRTRTQLPPAYTNSFTRGVYYPDKVFRSSVLHSTQDLFLPFFSNVTWFHAIHVSGTNGTKRFDNPVLPFNDGVYFASTEKSNIIRGWIFGTTLDSKTQSLLIVNNATNVVIKVCEFQFCNDPFLDVYYHKNNKSWMESGVYSSANNCTFEYVSQPFLMDLEGKQGNFKNLREFVFKNIDGYFKIYSKHTPINLVRDLPQGFSALEPLVDLPIGINITRFQTLLALHRSYLTPGDSSSGWTAGAAAYYVGYLQPRTFLLKYNENGTITDAVDCALDPLSETKCTLKSFTVEKGIYQTSNFRVQPTESIVRFPNITNLCPFGEVFNATRFASVYAWNRKRISNCVADYSVLYNSASFSTFKCYGVSPTKLNDLCFTNVYADSFVIRGDEVRQIAPGQTGKIADYNYKLPDDFTGCVIAWNSNNLDSKVGGNYNYRYRLFRKSNLKPFERDISTEIYQAGSKPCNGVEGFNCYFPLQSYGFQPTNGVGYQPYRVVVLSFELLHAPATVCGPKKSTNLVKNKCVNFNFNGLTGTGVLTESNKKFLPFQQFGRDIADTTDAVRDPQTLEILDITPCSFGGVSVITPGTNTSNQVAVLYQGVNCTEVPVAIHADQLTPTWRVYSTGSNVFQTRAGCLIGAEHVNNSYECDIPIGAGICASYQTQTNSRGSASSVASQSIIAYTMSLGAENSVAYSNNSIAIPTNFTISVTTEILPVSMTKTSVDCTMYICGDSTECSNLLLQYGSFCTQLNRALTGIAVEQDKNTQEVFAQVKQIYKTPPIKDFGGFNFSQILPDPSKPSKRSPIEDLLFNKVTLADAGFIKQYGDCLGDIAARDLICAQKFNGLTVLPPLLTDEMIAQYTSALLAGTITSGWTFGAGPALQIPFPMQMAYRFNGIGVTQNVLYENQKLIANQFNSAIGKIQDSLSSTPSALGKLQNVVNQNAQALNTLVKQLSSNFGAISSVLNDILSRLDPPEAEVQIDRLITGRLQSLQTYVTQQLIRAAEIRASANLAATKMSECVLGQSKRVDFCGKGYHLMSFPQSAPHGVVFLHVTYVPAQEKNFTTAPAICHDGKAHFPREGVFVSNGTHWFVTQRNFYEPQIITTDNTFVSGNCDVVIGIVNNTVYDPLQPELDSFKEELDKYFKNHTSPDVDLGDISGINASVVNIQKEIDRLNEVAKNLNESLIDLQELGKYGSGSGSGSGSGSGSGSGSGSGSGSGSGSGSGSMQWNSSTFHQALLDPRVRGLYFPAGGSSSGTVNPVPTTASPISSIFSRTGDPAPNMESTTSGFLGPLLALQAGFFLLTRILTIPQSLDSWWTSLNFLGGAPTCPGQNLQSPTSNHSPTSCPPICPGYRWMCLRRFIIFLFILLLCLIFLLVLLDYQGMLPVCPLLPGTSTTSTGPCKTCTIPAQGTSMFPSCCCTKPSDGNCTCIPIPSSWAFARFLWEWASVRFSWLSLLVPFVQWFVGLSPTVWLSVIWMMWYWGPSLYNILNPFLPLLPIFFCLWVYI

SEQ ID NO: 191 - protein, 1517 aa, synthetic construct
  REGION 1..1517: note = Recombinant Sequence
MFVFLVLLPLVSSQCVNLRTRTQLPPAYTNSFTRGVYYPDKVFRSSVLHSTQDLFLPFFSNVTWFHAIHFSGTNGTKRFDNPVLPFNDGVYFASIEKSNIIRGWIFGTTLDSKTQSLLIVNNATNVVIKVCEFQFCNDPFLDVYYHKNNKSWMESGVYSSANNCTFEYVSQPFLMDLEGKQGNFKNLREFVFKNIDGYFKIYSKHTPINLVRDLPQGFSVLEPLVDLPIGINITRFQTLLALHRSYLTPGDSSSGLTAGAAAYYVGYLQPRTFLLKYNENGTITDAVDCALDPLSETKCTLKSFTVEKGIYQTSNFRVQPTESIVRFPNITNLCPFGEVFNATRFASVYAWNRKRISNCVADYSVLYNSASFSTFKCYGVSPTKLNDLCFTNVYADSFVIRGDEVRQIAPGQTGNIADYNYKLPDDFTGCVIAWNSNNLDSKVGGNYNYRYRLFRKSNLKPFERDISTEIYQAGSKPCNGVEGFNCYFPLQSYGFQPTNGVGYQPYRVVVLSFELLHAPATVCGPKKSTNLVKNKCVNFNFNGLTGTGVLTESNKKFLPFQQFGRDIADTTDAVRDPQTLEILDITPCSFGGVSVITPGTNTSNQVAVLYQGVNCTEVPVAIHADQLTPTWRVYSTGSNVFQTRAGCLIGAEHVNNSYECDIPIGAGICASYQTQTNSRGSASSVASQSIIAYTMSLGAENSVAYSNNSIAIPTNFTISVTTEILPVSMTKTSVDCTMYICGDSTECSNLLLQYGSFCTQLNRALTGIAVEQDKNTQEVFAQVKQIYKTPPIKDFGGFNFSQILPDPSKPSKRSPIEDLLFNKVTLADAGFIKQYGDCLGDIAARDLICAQKFNGLTVLPPLLTDEMIAQYTSALLAGTITSGWTFGAGPALQIPFPMQMAYRFNGIGVTQNVLYENQKLIANQFNSAIGKIQDSLSSTPSALGKLQNVVNQNAQALNTLVKQLSSNFGAISSVLNDILSRLDPPEAEVQIDRLITGRLQSLQTYVTQQLIRAAEIRASANLAATKMSECVLGQSKRVDFCGKGYHLMSFPQSAPHGVVFLHVTYVPAQEKNFTTAPAICHDGKAHFPREGVFVSNGTHWFVTQRNFYEPQIITTDNTFVSGNCDVVIGIVNNTVYDPLQPELDSFKEELDKYFKNHTSPDVDLGDISGINASVVNIQKEIDRLNEVAKNLNESLIDLQELGKYGSGSGSGSGSGSGSGSGSGSGSGSGSGSGSGSMQWNSSTFHQALLDPRVRGLYFPAGGSSSGTVNPVPTTASPISSIFSRTGDPAPNMESTTSGFLGPLLALQAGFFLLTRILTIPQSLDSWWTSLNFLGGAPTCPGQNLQSPTSNHSPTSCPPICPGYRWMCLRRFIIFLFILLLCLIFLLVLLDYQGMLPVCPLLPGTSTTSTGPCKTCTIPAQGTSMFPSCCCTKPSDGNCTCIPIPSSWAFARFLWEWASVRFSWLSLLVPFVQWFVGLSPTVWLSVIWMMWYWGPSLYNILNPFLPLLPIFFCLWVYI

SEQ ID NO: 192 - protein, 1516 aa, synthetic construct
  REGION 1..1516: note = Recombinant Sequence
MFVFLVLLPLVSSQCVNLTTRTQLPPAYTNSFTRGVYYPDKVFRSSVLHSTQDLFLPFFSNVTWFHAISGTNGTKRFDNPVLPFNDGVYFASTEKSNIIRGWIFGTTLDSKTQSLLIVNNATNVVIKVCEFQFCNDPFLGVYHKNNKSWMESEFRVYSSANNCTFEYVSQPFLMDLEGKQGNFKNLREFVFKNIDGYFKIYSKHTPINLVRDLPQGFSALEPLVDLPIGINITRFQTLLALHRSYLTPGDSSSGWTAGAAAYYVGYLQPRTFLLKYNENGTITDAVDCALDPLSETKCTLKSFTVEKGIYQTSNFRVQPTESIVRFPNITNLCPFGEVFNATRFASVYAWNRKRISNCVADYSVLYNSASFSTFKCYGVSPTKLNDLCFTNVYADSFVIRGDEVRQIAPGQTGKIADYNYKLPDDFTGCVIAWNSNNLDSKVGGNYNYLYRLFRKSNLKPFERDISTEIYQAGSTPCNGVEGFNCYFPLQSYGFQPTYGVGYQPYRVVVLSFELLHAPATVCGPKKSTNLVKNKCVNFNFNGLTGTGVLTESNKKFLPFQQFGRDIDDTTDAVRDPQTLEILDITPCSFGGVSVITPGTNTSNQVAVLYQGVNCTEVPVAIHADQLTPTWRVYSTGSNVFQTRAGCLIGAEHVNNSYECDIPIGAGICASYQTQTNSHGSASSVASQSIIAYTMSLGAENSVAYSNNSIAIPINFTISVTTEILPVSMTKTSVDCTMYICGDSTECSNLLLQYGSFCTQLNRALTGIAVEQDKNTQEVFAQVKQIYKTPPIKDFGGFNFSQILPDPSKPSKRSPIEDLLFNKVTLADAGFIKQYGDCLGDIAARDLICAQKFNGLTVLPPLLTDEMIAQYTSALLAGTITSGWTFGAGPALQIPFPMQMAYRFNGIGVTQNVLYENQKLIANQFNSAIGKIQDSLSSTPSALGKLQDVVNQNAQALNTLVKQLSSNFGAISSVLNDILARLDPPEAEVQIDRLITGRLQSLQTYVTQQLIRAAEIRASANLAATKMSECVLGQSKRVDFCGKGYHLMSFPQSAPHGVVFLHVTYVPAQEKNFTTAPAICHDGKAHFPREGVFVSNGTHWFVTQRNFYEPQIITTHNTFVSGNCDVVIGIVNNTVYDPLQPELDSFKEELDKYFKNHTSPDVDLGDISGINASVVNIQKEIDRLNEVAKNLNESLIDLQELGKYGSGSGSGSGSGSGSGSGSGSGSGSGSGSGSGSMQWNSSTFHQALLDPRVRGLYFPAGGSSSGTVNPVPTTASPISSIFSRTGDPAPNMESTTSGFLGPLLALQAGFFLLTRILTIPQSLDSWWTSLNFLGGAPTCPGQNLQSPTSNHSPTSCPPICPGYRWMCLRRFIIFLFILLLCLIFLLVLLDYQGMLPVCPLLPGTSTTSTGPCKTCTIPAQGTSMFPSCCCTKPSDGNCTCIPIPSSWAFARFLWEWASVRFSWLSLLVPFVQWFVGLSPTVWLSVIWMMWYWGPSLYNILNPFLPLLPIFFCLWVYI

SEQ ID NO: 193 - protein, 1516 aa, synthetic construct
  REGION 1..1516: note = Recombinant Sequence
MFVFLVLLPLVSSQCVNLTTRTQLPPAYTNSFTRGVYYPDKVFRSSVLHSTQDLFLPFFSNVTWFHAISGTNGTKRFDNPVLPFNDGVYFASTEKSNIIRGWIFGTTLDSKTQSLLIVNNATNVVIKVCEFQFCNDPFLGVYHKNNKSWMESEFRVYSSANNCTFEYVSQPFLMDLEGKQGNFKNLREFVFKNIDGYFKIYSKHTPINLVRDLPQGFSALEPLVDLPIGINITRFQTLLALHRSYLTPGDSSSGWTAGAAAYYVGYLQPRTFLLKYNENGTITDAVDCALDPLSETKCTLKSFTVEKGIYQTSNFRVQPTESIVRFPNITNLCPFGEVFNATRFASVYAWNRKRISNCVADYSVLYNSASFSTFKCYGVSPTKLNDLCFTNVYADSFVIRGDEVRQIAPGQTGKIADYNYKLPDDFTGCVIAWNSNNLDSKVGGNYNYLYRLFRKSNLKPFERDISTEIYQAGSTPCNGVKGFNCYFPLQPYGFQPTYGVGYQPYRVVVLSFELLHAPATVCGPKKSTNLVKNKCVNFNFNGLTGTGVLTESNKKFLPFQQFGRDIDDTTDAVRDPQTLEILDITPCSFGGVSVITPGTNTSNQVAVLYQGVNCTEVPVAIHADQLTPTWRVYSTGSNVFQTRAGCLIGAEHVNNSYECDIPIGAGICASYQTQTNSHGSASSVASQSIIAYTMSLGAENSVAYSNNSIAIPINFTISVTTEILPVSMTKTSVDCTMYICGDSTECSNLLLQYGSFCTQLNRALTGIAVEQDKNTQEVFAQVKQIYKTPPIKDFGGFNFSQILPDPSKPSKRSPIEDLLFNKVTLADAGFIKQYGDCLGDIAARDLICAQKFNGLTVLPPLLTDEMIAQYTSALLAGTITSGWTFGAGPALQIPFPMQMAYRFNGIGVTQNVLYENQKLIANQFNSAIGKIQDSLSSTPSALGKLQDVVNQNAQALNTLVKQLSSNFGAISSVLNDILARLDPPEAEVQIDRLITGRLQSLQTYVTQQLIRAAEIRASANLAATKMSECVLGQSKRVDFCGKGYHLMSFPQSAPHGVVFLHVTYVPAQEKNFTTAPAICHDGKAHFPREGVFVSNGTHWFVTQRNFYEPQIITTHNTFVSGNCDVVIGIVNNTVYDPLQPELDSFKEELDKYFKNHTSPDVDLGDISGINASVVNIQKEIDRLNEVANNLNESLIDLQELGKYGSGSGSGSGSGSGSGSGSGSGSGSGSGSGSGSMQWNSSTFHQALLDPRVRGLYFPAGGSSSGTVNPVPTTASPISSIFSRTGDPAPNMESTTSGFLGPLLALQAGFFLLTRILTIPQSLDSWWTSLNFLGGAPTCPGQNLQSPTSNHSPTSCPPICPGYRWMCLRRFIIFLFILLLCLIFLLVLLDYQGMLPVCPLLPGTSTTSTGPCKTCTIPAQGTSMFPSCCCTKPSDGNCTCIPIPSSWAFARFLWEWASVRFSWLSLLVPFVQWFVGLSPTVWLSVIWMMWYWGPSLYNILNPFLPLLPIFFCLWVYI

SEQ ID NO: 194 - protein, 1516 aa, synthetic construct
  REGION 1..1516: note = Recombinant Sequence
MFVFLVLLPLVSSQCVNFTTRTQLPPAYTNSFTRGVYYPDKVFRSSVLHSTQDLFLPFFSNVTWFHAIHVSGTNGTKRFANPVLPFNDGVYFASTEKSNIIRGWIFGTTLDSKTQSLLIVNNATNVVIKVCEFQFCNDPFLGVYYHKNNKSWMESEFRVYSSANNCTFEYVSQPFLMDLEGKQGNFKNLREFVFKNIDGYFKIYSKHTPINLVRGLPQGFSALEPLVDLPIGINITRFQTLHRSYLTPGDSSSGWTAGAAAYYVGYLQPRTFLLKYNENGTITDAVDCALDPLSETKCTLKSFTVEKGIYQTSNFRVQPTESIVRFPNITNLCPFGEVFNATRFASVYAWNRKRISNCVADYSVLYNSASFSTFKCYGVSPTKLNDLCFTNVYADSFVIRGDEVRQIAPGQTGNIADYNYKLPDDFTGCVIAWNSNNLDSKVGGNYNYLYRLFRKSNLKPFERDISTEIYQAGSTPCNGVKGFNCYFPLQSYGFQPTYGVGYQPYRVVVLSFELLHAPATVCGPKKSTNLVKNKCVNFNFNGLTGTGVLTESNKKFLPFQQFGRDIADTTDAVRDPQTLEILDITPCSFGGVSVITPGTNTSNQVAVLYQGVNCTEVPVAIHADQLTPTWRVYSTGSNVFQTRAGCLIGAEHVNNSYECDIPIGAGICASYQTQTNSPGSASSVASQSIIAYTMSLGVENSVAYSNNSIAIPTNFTISVTTEILPVSMTKTSVDCTMYICGDSTECSNLLLQYGSFCTQLNRALTGIAVEQDKNTQEVFAQVKQIYKTPPIKDFGGFNFSQILPDPSKPSKRSPIEDLLFNKVTLADAGFIKQYGDCLGDIAARDLICAQKFNGLTVLPPLLTDEMIAQYTSALLAGTITSGWTFGAGPALQIPFPMQMAYRFNGIGVTQNVLYENQKLIANQFNSAIGKIQDSLSSTPSALGKLQDVVNQNAQALNTLVKQLSSNFGAISSVLNDILSRLDPPEAEVQIDRLITGRLQSLQTYVTQQLIRAAEIRASANLAATKMSECVLGQSKRVDFCGKGYHLMSFPQSAPHGVVFLHVTYVPAQEKNFTTAPAICHDGKAHFPREGVFVSNGTHWFVTQRNFYEPQIITTDNTFVSGNCDVVIGIVNNTVYDPLQPELDSFKEELDKYFKNHTSPDVDLGDISGINASVVNIQKEIDRLNEVAKNLNESLIDLQELGKYGSGSGSGSGSGSGSGSGSGSGSGSGSGSGSGSMQWNSSTFHQALLDPRVRGLYFPAGGSSSGTVNPVPTTASPISSIFSRTGDPAPNMESTTSGFLGPLLALQAGFFLLTRILTIPQSLDSWWTSLNFLGGAPTCPGQNLQSPTSNHSPTSCPPICPGYRWMCLRRFIIFLFILLLCLIFLLVLLDYQGMLPVCPLLPGTSTTSTGPCKTCTIPAQGTSMFPSCCCTKPSDGNCTCIPIPSSWAFARFLWEWASVRFSWLSLLVPFVQWFVGLSPTVWLSVIWMMWYWGPSLYNILNPFLPLLPIFFCLWVYI

SEQ ID NO: 195 - protein, 1519 aa, synthetic construct
  REGION 1..1519: note = Recombinant Sequence
MFVFLVLLPLVSSQCVNFTNRTQLPSAYTNSFTRGVYYPDKVFRSSVLHSTQDLFLPFFSNVTWFHAIHVSGTNGTKRFDNPVLPFNDGVYFASTEKSNIIRGWIFGTTLDSKTQSLLIVNNATNVVIKVCEFQFCNYPFLGVYYHKNNKSWMESEFRVYSSANNCTFEYVSQPFLMDLEGKQGNFKNLSEFVFKNIDGYFKIYSKHTPINLVRDLPQGFSALEPLVDLPIGINITRFQTLLALHRSYLTPGDSSSGWTAGAAAYYVGYLQPRTFLLKYNENGTITDAVDCALDPLSETKCTLKSFTVEKGIYQTSNFRVQPTESIVRFPNITNLCPFGEVFNATRFASVYAWNRKRISNCVADYSVLYNSASFSTFKCYGVSPTKLNDLCFTNVYADSFVIRGDEVRQIAPGQTGTIADYNYKLPDDFTGCVIAWNSNNLDSKVGGNYNYLYRLFRKSNLKPFERDISTEIYQAGSTPCNGVKGFNCYFPLQSYGFQPTYGVGYQPYRVVVLSFELLHAPATVCGPKKSTNLVKNKCVNFNFNGLTGTGVLTESNKKFLPFQQFGRDIADTTDAVRDPQTLEILDITPCSFGGVSVITPGTNTSNQVAVLYQGVNCTEVPVAIHADQLTPTWRVYSTGSNVFQTRAGCLIGAEYVNNSYECDIPIGAGICASYQTQTNSPGSASSVASQSIIAYTMSLGAENSVAYSNNSIAIPTNFTISVTTEILPVSMTKTSVDCTMYICGDSTECSNLLLQYGSFCTQLNRALTGIAVEQDKNTQEVFAQVKQIYKTPPIKDFGGFNFSQILPDPSKPSKRSPIEDLLFNKVTLADAGFIKQYGDCLGDIAARDLICAQKFNGLTVLPPLLTDEMIAQYTSALLAGTITSGWTFGAGPALQIPFPMQMAYRFNGIGVTQNVLYENQKLIANQFNSAIGKIQDSLSSTPSALGKLQDVVNQNAQALNTLVKQLSSNFGAISSVLNDILSRLDPPEAEVQIDRLITGRLQSLQTYVTQQLIRAAEIRASANLAAIKMSECVLGQSKRVDFCGKGYHLMSFPQSAPHGVVFLHVTYVPAQEKNFTTAPAICHDGKAHFPREGVFVSNGTHWFVTQRNFYEPQIITTDNTFVSGNCDVVIGIVNNTVYDPLQPELDSFKEELDKYFKNHTSPDVDLGDISGINASFVNIQKEIDRLNEVAKNLNESLIDLQELGKYGSGSGSGSGSGSGSGSGSGSGSGSGSGSGSGSMQWNSSTFHQALLDPRVRGLYFPAGGSSSGTVNPVPTTASPISSIFSRTGDPAPNMESTTSGFLGPLLALQAGFFLLTRILTIPQSLDSWWTSLNFLGGAPTCPGQNLQSPTSNHSPTSCPPICPGYRWMCLRRFIIFLFILLLCLIFLLVLLDYQGMLPVCPLLPGTSTTSTGPCKTCTIPAQGTSMFPSCCCTKPSDGNCTCIPIPSSWAFARFLWEWASVRFSWLSLLVPFVQWFVGLSPTVWLSVIWMMWYWGPSLYNILNPFLPLLPIFFCLWVYI

SEQ ID NO: 196 - protein, 1519 aa, synthetic construct
  REGION 1..1519: note = Recombinant Sequence
MFVFLVLLPLVSSQCVNLTTRTQLPPAYTNSFTRGVYYPDKVFRSSVLHSTQDLFLPFFSNVTWFHAIHVSGTNGTKRFDNPVLPFNDGVYFASIEKSNIIRGWIFGTTLDSKTQSLLIVNNATNVVIKVCEFQFCNDPFLDVYYHKNNKSWMKSEFRVYSSANNCTFEYVSQPFLMDLEGKQGNFKNLREFVFKNIDGYFKIYSKHTPINLVRDLPQGFSALEPLVDLPIGINITRFQTLLALHRSYLTPGDSSSGWTAGAAAYYVGYLQPRTFLLKYNENGTITDAVDCALDPLSETKCTLKSFTVEKGIYQTSNFRVQPTESIVRFPNITNLCPFGEVFNATRFASVYAWNRKRISNCVADYSVLYNSASFSTFKCYGVSPTKLNDLCFTNVYADSFVIRGDEVRQIAPGQTGKIADYNYKLPDDFTGCVIAWNSNNLDSKVGGNYNYRYRLFRKSNLKPFERDISTEIYQAGSTPCNGVQGFNCYFPLQSYGFQPTNGVGYQPYRVVVLSFELLHAPATVCGPKKSTNLVKNKCVNFNFNGLTGTGVLTESNKKFLPFQQFGRDIADTTDAVRDPQTLEILDITPCSFGGVSVITPGTNTSNQVAVLYQGVNCTEVPVAIHADQLTPTWRVYSTGSNVFQTRAGCLIGAEHVNNSYECDIPIGAGICASYQTQTNSRGSASSVASQSIIAYTMSLGAENSVAYSNNSIAIPTNFTISVTTEILPVSMTKTSVDCTMYICGDSTECSNLLLQYGSFCTQLNRALTGIAVEQDKNTQEVFAQVKQIYKTPPIKDFGGFNFSQILPDPSKPSKRSPIEDLLFNKVTLADAGFIKQYGDCLGDIAARDLICAQKFNGLTVLPPLLTDEMIAQYTSALLAGTITSGWTFGAGPALQIPFPMQMAYRFNGIGVTQNVLYENQKLIANQFNSAIGKIQDSLSSTPSALGKLQDVVNQNAQALNTLVKQLSSNFGAISSVLNDILSRLDPPEAEVQIDRLITGRLQSLQTYVTQQLIRAAEIRASANLAATKMSECVLGQSKRVDFCGKGYHLMSFPQSAPHGVVFLHVTYVPAHEKNFTTAPAICHDGKAHFPREGVFVSNGTHWFVTQRNFYEPQIITTDNTFVSGNCDVVIGIVNNTVYDPLQPELDSFKEELDKYFKNHTSPDVDLGDISGINASVVNIQKEIDRLNEVAKNLNESLIDLQELGKYGSGSGSGSGSGSGSGSGSGSGSGSGSGSGSGSMQWNSSTFHQALLDPRVRGLYFPAGGSSSGTVNPVPTTASPISSIFSRTGDPAPNMESTTSGFLGPLLALQAGFFLLTRILTIPQSLDSWWTSLNFLGGAPTCPGQNLQSPTSNHSPTSCPPICPGYRWMCLRRFIIFLFILLLCLIFLLVLLDYQGMLPVCPLLPGTSTTSTGPCKTCTIPAQGTSMFPSCCCTKPSDGNCTCIPIPSSWAFARFLWEWASVRFSWLSLLVPFVQWFVGLSPTVWLSVIWMMWYWGPSLYNILNPFLPLLPIFFCLWVYI

SEQ ID NO: 197 - protein, 1512 aa, synthetic construct
  REGION 1..1512: note = Recombinant Sequence
MFVFLVLLPLVSSQCVNLTTRTQLPPAYTNSFTRGVYYPDKVFRSSVLHSTQDLFLPFFSNVTWFHAIHVSGTNVIKRFDNPVLPFNDGVYFASTEKSNIIRGWIFGTTLDSKTQSLLIVNNATNVVIKVCEFQFCNDPFLGVYYHKNNKSWMESEFRVYSSANNCTFEYVSQPFLMDLEGKQGNFKNLREFVFKNIDGYFKIYSKHTPINLVRDLPQGFSALEPLVDLPIGINITRFQTLLALHNSSSGWTAGAAAYYVGYLQPRTFLLKYNENGTITDAVDCALDPLSETKCTLKSFTVEKGIYQTSNFRVQPTESIVRFPNITNLCPFGEVFNATRFASVYAWNRKRISNCVADYSVLYNSASFSTFKCYGVSPTKLNDLCFTNVYADSFVIRGDEVRQIAPGQTGKIADYNYKLPDDFTGCVIAWNSNNLDSKVGGNYNYQYRLFRKSNLKPFERDISTEIYQAGSTPCNGVEGFNCYSPLQSYGFQPTNGVGYQPYRVVVLSFELLHAPATVCGPKKSTNLVKNKCVNFNFNGLTGTGVLTESNKKFLPFQQFGRDIADTTDAVRDPQTLEILDITPCSFGGVSVITPGTNTSNQVAVLYQGVNCTEVPVAIHADQLTPTWRVYSTGSNVFQTRAGCLIGAEHVNNSYECDIPIGAGICASYQTQTNSPGSASSVASQSIIAYTMSLGAENSVAYSNNSIAIPTNFTISVTTEILPVSMTKTSVDCTMYICGDSTECSNLLLQYGSFCTQLNRALTGIAVEQDKNTQEVFAQVKQIYKTPPIKDFGGFNFSQILPDPSKPSKRSPIEDLLFNKVTLADAGFIKQYGDCLGDIAARDLICAQKFNGLNVLPPLLTDEMIAQYTSALLAGTITSGWTFGAGPALQIPFPMQMAYRFNGIGVTQNVLYENQKLIANQFNSAIGKIQDSLSSTPSALGKLQDVVNQNAQALNTLVKQLSSNFGAISSVLNDILSRLDPPEAEVQIDRLITGRLQSLQTYVTQQLIRAAEIRASANLAATKMSECVLGQSKRVDFCGKGYHLMSFPQSAPHGVVFLHVTYVPAQEKNFTTAPAICHDGKAHFPREGVFVSNGTHWFVTQRNFYEPQIITTDNTFVSGNCDVVIGIVNNTVYDPLQPELDSFKEELDKYFKNHTSPDVDLGDISGINASVVNIQKEIDRLNEVAKNLNESLIDLQELGKYGSGSGSGSGSGSGSGSGSGSGSGSGSGSGSGSMQWNSSTFHQALLDPRVRGLYFPAGGSSSGTVNPVPTTASPISSIFSRTGDPAPNMESTTSGFLGPLLALQAGFFLLTRILTIPQSLDSWWTSLNFLGGAPTCPGQNLQSPTSNHSPTSCPPICPGYRWMCLRRFIIFLFILLLCLIFLLVLLDYQGMLPVCPLLPGTSTTSTGPCKTCTIPAQGTSMFPSCCCTKPSDGNCTCIPIPSSWAFARFLWEWASVRFSWLSLLVPFVQWFVGLSPTVWLSVIWMMWYWGPSLYNILNPFLPLLPIFFCLWVYI

SEQ ID NO: 198 - protein, 1511 aa, synthetic construct
  REGION 1..1511: note = Recombinant Sequence
MFVFLVLLPLVSSQCVNLTTRTQLPPAYTNSFTRGVYYPDKVFRSSVLHSTQDLFLPFFSNVTWFHAIHVSGTNVIKRFDNPVLPFNDGVYFASTEKSNIIRGWIFGTTLDSKTQSLLIVNNATNVVIKVCEFQFCNDPFLGVYYHKNNKSWMESEFRVYSSANNCTFEYVSQPFLMDLEGKQGNFKNLREFVFKNIDGYFKIYSKHTPINLVRDLPQGFSALEPLVDLPIGINITRFQTLLALHSSSGWTAGAAAYYVGYLQPRTFLLKYNENGTITDAVDCALDPLSETKCTLKSFTVEKGIYQTSNFRVQPTESIVRFPNITNLCPFGEVFNATRFASVYAWNRKRISNCVADYSVLYNSASFSTFKCYGVSPTKLNDLCFTNVYADSFVIRGDEVRQIAPGQTGKIADYNYKLPDDFTGCVIAWNSNNLDSKVGGNYNYQYRLFRKSNLKPFERDISTEIYQAGSTPCNGVEGFNCYSPLQSYGFQPTNGVGYQPYRVVVLSFELLHAPATVCGPKKSTNLVKNKCVNFNFNGLTGTGVLTESNKKFLPFQQFGRDIADTTDAVRDPQTLEILDITPCSFGGVSVITPGTNTSNQVAVLYQGVNCTEVPVAIHADQLTPTWRVYSTGSNVFQTRAGCLIGAEHVNNSYECDIPIGAGICASYQTQTNSPGSASSVASQSIIAYTMSLGAENSVAYSNNSIAIPTNFTISVTTEILPVSMTKTSVDCTMYICGDSTECSNLLLQYGSFCTQLNRALTGIAVEQDKNTQEVFAQVKQIYKTPPIKDFGGFNFSQILPDPSKPSKRSPIEDLLFNKVTLADAGFIKQYGDCLGDIAARDLICAQKFNGLNVLPPLLTDEMIAQYTSALLAGTITSGWTFGAGPALQIPFPMQMAYRFNGIGVTQNVLYENQKLIANQFNSAIGKIQDSLSSTPSALGKLQDVVNQNAQALNTLVKQLSSNFGAISSVLNDILSRLDPPEAEVQIDRLITGRLQSLQTYVTQQLIRAAEIRASANLAATKMSECVLGQSKRVDFCGKGYHLMSFPQSAPHGVVFLHVTYVPAQEKNFTTAPAICHDGKAHFPREGVFVSNGTHWFVTQRNFYEPQIITTDNTFVSGNCDVVIGIVNNTVYDPLQPELDSFKEELDKYFKNHTSPDVDLGDISGINASVVNIQKEIDRLNEVAKNLNESLIDLQELGKYGSGSGSGSGSGSGSGSGSGSGSGSGSGSGSGSMQWNSSTFHQALLDPRVRGLYFPAGGSSSGTVNPVPTTASPISSIFSRTGDPAPNMESTTSGFLGPLLALQAGFFLLTRILTIPQSLDSWWTSLNFLGGAPTCPGQNLQSPTSNHSPTSCPPICPGYRWMCLRRFIIFLFILLLCLIFLLVLLDYQGMLPVCPLLPGTSTTSTGPCKTCTIPAQGTSMFPSCCCTKPSDGNCTCIPIPSSWAFARFLWEWASVRFSWLSLLVPFVQWFVGLSPTVWLSVIWMMWYWGPSLYNILNPFLPLLPIFFCLWVYI

SEQ ID NO: 199 - protein, 1519 aa, synthetic construct
  REGION 1..1519: note = Recombinant Sequence
MFVFLVLLPLVSSQCVNLTTRTQLPPAYTNSFTRGVYYPDKVFRSSVLHSTQDLFLPFFSNVTWFHAIHVSGTNGTKRFDNPVLPFNDGVYFASTEKSNIIRGWIFGTTLDSKTQSLLIVNNATNVVIKVCEFQFCNDPFLGVYYHKNNKSLMESEFRVYSSANNCTFEYVSQPFLMDLEGKQGNFKNLREFVFKNIDGYFKIYSKHTPINLVRDLPQGFSALEPLVDLPIGINITRFQTLLALHRSYLTPGDSSSGWTAGAAAYYVGYLQPRTFLLKYNENGTITDAVDCALDPLSETKCTLKSFTVEKGIYQTSNFRVQPTESIVRFPNITNLCPFGEVFNATRFASVYAWNRKRISNCVADYSVLYNSASFSTFKCYGVSPTKLNDLCFTNVYADSFVIRGDEVRQIAPGQTGKIADYNYKLPDDFTGCVIAWNSNNLDSKVGGNYNYLYRLFRKSNLKPFERDISTEIYQAGSTPCNGVKGFNCYFPLQSYGFQPTNGVGYQPYRVVVLSFELLHAPATVCGPKKSTNLVKNKCVNFNFNGLTGTGVLTESNKKFLPFQQFGRDIADTTDAVRDPQTLEILDITPCSFGGVSVITPGTNTSNQVAVLYQGVNCTEVPVAIHADQLTPTWRVYSTGSNVFQTRAGCLIGAEHVNNSYECDIPIGAGICASYQTQTNSPGSASSVASQSIIAYTMSLGAENSVAYSNNSIAIPTNFTISVTTEILPVSMTKTSVDCTMYICGDSTECSNLLLQYGSFCTQLNRALTVIAVEQDKNTQEVFAQVKQIYKTPPIKDFGGFNFSQILPDPSKPSKRSPIEDLLFNKVTLADAGFIKQYGDCLGDIAARDLICAQKFNGLTVLPPLLTDEMIAQYTSALLAGTITSGWTFGAGPALQIPFPMQMAYRFNGIGVTQNVLYENQKLIANQFNSAIGKIQDSLSSTPSALGKLQDVVNQNAQALNTLVKQLSSNFGAISSVLNDILSRLDPPEAEVQIDRLITGRLQSLQTYVTQQLIRAAEIRASANLAATKMSECVLGQSKRVDFCGKGYHLMSFPQSAPHGVVFLHVTYVPAQEKNFTTAPAICHDGKAHFPREGVFVSNGTHWFVTQRNFYEPQIITTDNTFVSGNCDVVIGIVNNTVYDPLQPELDSFKEELDKYFKNHTSPDVDLGDISGINASVVNIQKEIDRLNEVAKNLNESLIDLQELGKYGSGSGSGSGSGSGSGSGSGSGSGSGSGSGSGSMQWNSSTFHQALLDPRVRGLYFPAGGSSSGTVNPVPTTASPISSIFSRTGDPAPNMESTTSGFLGPLLALQAGFFLLTRILTIPQSLDSWWTSLNFLGGAPTCPGQNLQSPTSNHSPTSCPPICPGYRWMCLRRFIIFLFILLLCLIFLLVLLDYQGMLPVCPLLPGTSTTSTGPCKTCTIPAQGTSMFPSCCCTKPSDGNCTCIPIPSSWAFARFLWEWASVRFSWLSLLVPFVQWFVGLSPTVWLSVIWMMWYWGPSLYNILNPFLPLLPIFFCLWVYI

SEQ ID NO: 200 - protein, 1519 aa, synthetic construct
  REGION 1..1519: note = Recombinant Sequence
MFVFLVLLPLVSSQCVNLTTRTQLPPAYTNSFTRGVYYPDKVFRSSVLHSTQDLFLPFFSNVTWFHAIHVSGTNGTKRFDNPVLPFNDGVYFASTEKSNIIRGWIFGTTLDSKTQSLLIVNNATNVVIKVCEFQFCNDPFLGVYYHKNNKSWMESEFRVYSSANNCTFEYVSQPFLMDLEGKQGNFKNLREFVFKNIDGYFKIYSKHTPINLVRDLPQGFSALEPLVDLPIGINITRFQTLLALHRSYLTPGDSSSGWTAGAAAYYVGYLQPRTFLLKYNENGTITDAVDCALDPLSETKCTLKSFTVEKGIYQTSNFRVQPTESIVRFPNITNLCPFGEVFNATRFASVYAWNRKRISNCVADYSVLYNSASFSTFKCYGVSPTKLNDLCFTNVYADSFVIRGDEVRQIAPGQTGKIADYNYKLPDDFTGCVIAWNSNNLDSKVGGNYNYLYRLFRKSNLKPFERDISTEIYQAGSKPCNGVEGFNCYFPLQSYGFQPTNGVGYQPYRVVVLSFELLHAPATVCGPKKSTNLVKNKCVNFNFNGLTGTGVLTESNKKFLPFQQFGRDIADTTDAVRDPQTLEILDITPCSFGGVSVITPGTNTSNQVAVLYQGVNCTEVPVAIHADQLTPTWRVYSTGSNVFQTRAGCLIGAEHVNNSYECDIPIGAGICASYQTQTNSHGSASSVASQSIIAYTMSLGAENSVAYSNNSIAIPTNFTISVTTEILPVSMAKTSVDCTMYICGDSTECSNLLLQYGSFCTQLNRALTGIAVEQDKNTQEVFAQVKQIYKTPPIKDFGGFNFSQILPDPSKPSKRSPIEDLLFNKVTLADAGFIKQYGDCLGDIAARDLICAQKFNGLTVLPPLLTDEMIAQYTSALLAGTITSGWTFGAGPALQIPFPMQMAYRFNGIGVTQNVLYENQKLIANQFNSAIGKIQDSLSSTPSALGKLQDVVNQNAQALNTLVKQLSSNFGAISSVLNDILSRLDPPEAEVQIDRLITGRLQSLQTYVTQQLIRAAEIRASANLAATKMSECVLGQSKRVDFCGKGYHLMSFPQSAPHGVVFLHVTYVPAQEKNFTTAPAICHDGKAHFPREGVFVSNGTHWFVTQRNFYEPQIITTDNTFVSGNCDVVIGIVNNTVYDPLQPELDSFKEELDKYFKNHTSPDVDLGDISGINASVVNIQKEIDRLNEVAKNLNESLIDLQELGKYGSGSGSGSGSGSGSGSGSGSGSGSGSGSGSGSMQWNSSTFHQALLDPRVRGLYFPAGGSSSGTVNPVPTTASPISSIFSRTGDPAPNMESTTSGFLGPLLALQAGFFLLTRILTIPQSLDSWWTSLNFLGGAPTCPGQNLQSPTSNHSPTSCPPICPGYRWMCLRRFIIFLFILLLCLIFLLVLLDYQGMLPVCPLLPGTSTTSTGPCKTCTIPAQGTSMFPSCCCTKPSDGNCTCIPIPSSWAFARFLWEWASVRFSWLSLLVPFVQWFVGLSPTVWLSVIWMMWYWGPSLYNILNPFLPLLPIFFCLWVYI

SEQ ID NO: 201 - protein, 1516 aa, synthetic construct
  REGION 1..1516: note = Recombinant Sequence
MFVFLVLLPLVSSQCVNLTTRTQLPPAYTNSFTRGVYYPDKVFRSSVLHSTRDLFLPFFSNVTWFHVISGTNGTKRFDNPVLPFNDGVYFASTEKSNIIRGWIFGTTLDSKTQSLLIVNNATNVVIKVCEFQFCNDPFLGVYHKNNKSWMESEFRVYSSANNCTFEYVSQPFLMDLEGKQGNFKNLREFVFKNIDGYFKIYSKHTPINLVRDLPQGFSALEPLVDLPIGINITRFQTLLALHRSYLTPGDSSSGWTAGAAAYYVGYLQPRTFLLKYNENGTITDAVDCALDPLSETKCTLKSFTVEKGIYQTSNFRVQPTESIVRFPNITNLCPFGEVFNATRFASVYAWNRKRISNCVADYSVLYNSASFSTFKCYGVSPTKLNDLCFTNVYADSFVIRGDEVRQIAPGQTGKIADYNYKLPDDFTGCVIAWNSNNLDSKVGGNYNYLYRLFRKSNLKPFERDISTEIYQAGSTPCNGVKGFNCYFPLQSYGFQPTNGVGYQPYRVVVLSFELLHAPATVCGPKKSTNLVKNKCVNFNFNGLTGTGVLTESNKKFLPFQQFGRDIADTTDAVRDPQTLEILDITPCSFGGVSVITPGTNTSNQVAVLYQGVNCTEVPVAIHADQLTPTWRVYSTGSNVFQTRAGCLIGAEHVNNSYECDIPIGAGICASYQTHTNSPGSASSVASQSIIAYTMSLGAENSVAYSNNSIAIPTNFTISVTTEILPVSMTKTSVDCTMYICGDSTECSNLLLQYGSFCTQLNRALTGIAVEQDKNTQEVFAQVKQIYKTPPIKDFGGFNFSQILPDPSKPSKRSPIEDLLFNKVTLADAGFIKQYGDCLGDIAARDLICAQKFNGLTVLPPLLTDEMIAQYTSALLAGTITSGWTLGAGPALQIPFPMQMAYRFNGIGVTQNVLYENQKLIANQFNSAIGKIQDSLSSTPSALGKLQDVVNQNAQALNTLVKQLSSNFGAISSVLNDILSRLDPPEAEVQIDRLITGRLQSLQTYVTQQLIRAAEIRASANLAATKMSECVLGQSKRVDFCGKGYHLMSFPQSAPHGVVFLHVTYVPAQEKNFTTAPAICHDGKAHFPREGVFVSNGTHWFVTQRNFYEPQIITTDNTFVSGNCDVVIGIVNNTVYDPLQPELDSFKEELDKYFKNHTSPDVDLGDISGINASVVNIQKEIDRLNEVAKNLNESLIDLQELGKYGSGSGSGSGSGSGSGSGSGSGSGSGSGSGSGSMQWNSSTFHQALLDPRVRGLYFPAGGSSSGTVNPVPTTASPISSIFSRTGDPAPNMESTTSGFLGPLLALQAGFFLLTRILTIPQSLDSWWTSLNFLGGAPTCPGQNLQSPTSNHSPTSCPPICPGYRWMCLRRFIIFLFILLLCLIFLLVLLDYQGMLPVCPLLPGTSTTSTGPCKTCTIPAQGTSMFPSCCCTKPSDGNCTCIPIPSSWAFARFLWEWASVRFSWLSLLVPFVQWFVGLSPTVWLSVIWMMWYWGPSLYNILNPFLPLLPIFFCLWVYI

SEQ ID NO: 202 - protein, 1519 aa, synthetic construct
  REGION 1..1519: note = Recombinant Sequence
MFVFFVLLPLVSSQCVNLTTRTQLPPAYTNSFTRGVYYPDKVFRSSVLHSTQDLFLPFFSNVTWFHAIHVSGTNGTKRFDNPVLPFNDGVYFASIEKSNIIRGWIFGTTLDSKTQSLLIVNNATNVVIKVCEFQFCNDPFLGVYYHKNNKSWMESEFRVYSSANNCTFEYVSQPFLMDLEGKQGNFKNLREFVFKNIDGYFKIYSKHTPINLVRDLPQGFSALEPLVDLPIGINITRFQTLLALHRSYLTPGGSSSGWTAGAAAYYVGYLQPRTFLLKYNENGTITDAVDCALDPLSETKCTLKSFTVEKGIYQTSNFRVQPTESIVRFPNITNLCPFGEVFNATRFASVYAWNRKRISNCVADYSVLYNSASFSTFKCYGVSPTKLNDLCFTNVYADSFVIRGDEVRQIAPGQTGKIADYNYKLPDDFTGCVIAWNSNNLDSKVGGNYNYLYRLFRKSNLKPFERDISTEIYQAGSTPCNGVKGFNCYFPLQSYGFQPTNGVGYQPYRVVVLSFELLHAPATVCGPKKSTNLVKNKCVNFNFNGLTGTGVLTESNKKFLPFQQFGRDIADTTDAVRDPQTLEILDITPCSFGGVSVITPGTNTSNQVAVLYQGVNCTEVPVAIHADQLTPTWRVYSTGSNVFQTRAGCLIGAEHVNNSYECDIPIGAGICASYQTQTNSPGSASSVASQSIIAYTMSLGVENSVAYSNNSIAIPTNFTISVTTEILPVSMTKTSVDCTMYICGDSTECSNLLLQYGSFCTQLNRALTGIAVEQDKNTQEVFAQVKQIYKTPPIKDFGGFNFSQILPDPSKPSKRSPIEDLLFNKVTLADAGFIKQYGDCLGDIAARDLICAQKFNGLTVLPPLLTDEMIAQYTSALLAGTITSGWTFGAGPALQIPFPMQMAYRFNGIGVTQNVLYENQKLIANQFNSAIGKIQDSLSSTPSALGKLQDVVNQNAQALNTLVKQLSSNFGAISSVLNDILSRLDPPEAEVQIDRLITGRLQSLQTYVTQQLIRAAEIRASANLAATKMSECVLGQSKRVDFCGKGYHLMSFPQSAPHGVVFLHVTYVPAQEKNFTTAPAICHDGKAHFPREGVFVSNGTHWFVTQRNFYEPQIITTDNTFVSGNCDVVIGIVNNTVYDPLQPELDSFKEELDKYFKNHTSPDVDLGDISGINASVVNIQKEIDRLNEVAKNLNESLIDLQELGKYGSGSGSGSGSGSGSGSGSGSGSGSGSGSGSGSMQWNSSTFHQALLDPRVRGLYFPAGGSSSGTVNPVPTTASPISSIFSRTGDPAPNMESTTSGFLGPLLALQAGFFLLTRILTIPQSLDSWWTSLNFLGGAPTCPGQNLQSPTSNHSPTSCPPICPGYRWMCLRRFIIFLFILLLCLIFLLVLLDYQGMLPVCPLLPGTSTTSTGPCKTCTIPAQGTSMFPSCCCTKPSDGNCTCIPIPSSWAFARFLWEWASVRFSWLSLLVPFVQWFVGLSPTVWLSVIWMMWYWGPSLYNILNPFLPLLPIFFCLWVYI

SEQ ID NO: 203 - protein, 1519 aa, synthetic construct
  REGION 1..1519: note = Recombinant Sequence
MFVFLVLLPLVSIQCVNLTTRTQLPPAYTNSFTRGVYYPDKVFRSSVLHSTQDLFLPFFSNVTWFHAIHVSGTNGTKRFDNPVLPFNDGVYFASTEKSNIIRGWIFGTTLDSKTQSLLIVNNATNVVIKVCEFQFCNDPFLGVYYHKNNKSCMESEFRVYSSANNCTFEYVSQPFLMDLEGKQGNFKNLREFVFKNIDGYFKIYSKHTPINLVRDLPQGFSALEPLVDLPIGINITRFQTLLALHRSYLTPGDSSSGWTAGAAAYYVGYLQPRTFLLKYNENGTITDAVDCALDPLSETKCTLKSFTVEKGIYQTSNFRVQPTESIVRFPNITNLCPFGEVFNATRFASVYAWNRKRISNCVADYSVLYNSASFSTFKCYGVSPTKLNDLCFTNVYADSFVIRGDEVRQIAPGQTGKIADYNYKLPDDFTGCVIAWNSNNLDSKVGGNYNYRYRLFRKSNLKPFERDISTEIYQAGSTPCNGVEGFNCYFPLQSYGFQPTNGVGYQPYRVVVLSFELLHAPATVCGPKKSTNLVKNKCVNFNFNGLTGTGVLTESNKKFLPFQQFGRDIADTTDAVRDPQTLEILDITPCSFGGVSVITPGTNTSNQVAVLYQGVNCTEVPVAIHADQLTPTWRVYSTGSNVFQTRAGCLIGAEHVNNSYECDIPIGAGICASYQTQTNSPGSASSVASQSIIAYTMSLGAENSVAYSNNSIAIPTNFTISVTTEILPVSMTKTSVDCTMYICGDSTECSNLLLQYGSFCTQLNRALTGIAVEQDKNTQEVFAQVKQIYKTPPIKDFGGFNFSQILPDPSKPSKRSPIEDLLFNKVTLADAGFIKQYGDCLGDIAARDLICAQKFNGLTVLPPLLTDEMIAQYTSALLAGTITSGWTFGAGPALQIPFPMQMAYRFNGIGVTQNVLYENQKLIANQFNSAIGKIQDSLSSTPSALGKLQDVVNQNAQALNTLVKQLSSNFGAISSVLNDILSRLDPPEAEVQIDRLITGRLQSLQTYVTQQLIRAAEIRASANLAATKMSECVLGQSKRVDFCGKGYHLMSFPQSAPHGVVFLHVTYVPAQEKNFTTAPAICHDGKAHFPREGVFVSNGTHWFVTQRNFYEPQIITTDNTFVSGNCDVVIGIVNNTVYDPLQPELDSFKEELDKYFKNHTSPDVDLGDISGINASVVNIQKEIDRLNEVAKNLNESLIDLQELGKYGSGSGSGSGSGSGSGSGSGSGSGSGSGSGSGSMQWNSSTFHQALLDPRVRGLYFPAGGSSSGTVNPVPTTASPISSIFSRTGDPAPNMESTTSGFLGPLLALQAGFFLLTRILTIPQSLDSWWTSLNFLGGAPTCPGQNLQSPTSNHSPTSCPPICPGYRWMCLRRFIIFLFILLLCLIFLLVLLDYQGMLPVCPLLPGTSTTSTGPCKTCTIPAQGTSMFPSCCCTKPSDGNCTCIPIPSSWAFARFLWEWASVRFSWLSLLVPFVQWFVGLSPTVWLSVIWMMWYWGPSLYNILNPFLPLLPIFFCLWVYI

SEQ ID NO: 204 - protein, 1518 aa, synthetic construct
  REGION 1..1518: note = Recombinant Sequence
MFVFLVLLPLVSSQCVNLTTRTQLPPAYTNSFTRGVYYPDKVFRSSVLHSTQDLFLPFFSNVTWFHAIHVSGTNGTKRFGNPVLPFNDGVYFASTEKSNIIRGWIFGTTLDSKTQSLLIVNNATNVVIKVCEFQFCNDPFLGVYHKNNKSWMESESRVYSSANNCTFEYVSQPFLMDLEGKQGNFKNLREFVFKNIDGYFKIYSKHTPINLVRDLPQGFSALEPLVDLPIGINITRFQTLLALHRSYLTPGDSSSGWTAGAAAYYVGYLQPRTFLLKYNENGTITDAVDCALDPLSETKCTLKSFTVEKGIYQTSNFRVQPTESIVRFPNITNLCPFGEVFNATRFASVYAWNRKRISNCVADYSVLYNSASFSTFKCYGVSPTKLNDLCFTNVYADSFVIRGDEVRQIAPGQTGKIADYNYKLPDDFTGCVIAWNSNNLDSKVGGNYNYRYRLFRKSNLKPFERDISTEIYQAGSTPCNGVEGFNCYFPLQSYGFQPTNGVGYQPYRVVVLSFELLHAPATVCGPKKSTNLVKNKCVNFNFNGLTGTGVLTESNKKFLPFQQFGRDIADTTDAVRDPQTLEILDITPCSFGGVSVITPGTNTSNQVAVLYQGVNCTEVPVAIHADQLTPTWRVYSTGSNVFQTRAGCLIGAEHVNNSYECDIPIGAGICASYQTQTNSPGSASSVASQSIIAYTMSLGAENSVAYSNNSIAIPTNFTISVTTEILPVSMTKTSVDCTMYICGDSTECSNLLLQYGSFCTQLNRALTGIAVEQDKNTQEVFAQVKQIYKTPPIKDFGGFNFSQILPDPSKPSKRSPIEDLLFNKVTLADAGFIKQYGDCLGDIAARDLICAQKFNGLNVLPPLLTDEMIAQYTSALLAGTITSGWTFGAGPALQIPFPMQMAYRFNGIGVTQNVLYENQKLIANQFNSAIGKIQDSLSSTPSALGKLQHVVNQNAQALNTLVKQLSSNFGAISSVLNDILSRLDPPEAEVQIDRLITGRLQSLQTYVTQQLIRAAEIRASANLAATKMSECVLGQSKRVDFCGKGYHLMSFPQSAPHGVVFLHVTYVPAQEKNFTTAPAICHDGKAHFPREGVFVSNGTHWFVTQRNFYEPQIITTDNTFVSGNCDVVIGIVNNTVYDPLQPELDSFKEELDKYFKNHTSPDVDLGDISGINASVVNIQKEIDRLNEVAKNLNESLIDLQELGKYGSGSGSGSGSGSGSGSGSGSGSGSGSGSGSGSMQWNSSTFHQALLDPRVRGLYFPAGGSSSGTVNPVPTTASPISSIFSRTGDPAPNMESTTSGFLGPLLALQAGFFLLTRILTIPQSLDSWWTSLNFLGGAPTCPGQNLQSPTSNHSPTSCPPICPGYRWMCLRRFIIFLFILLLCLIFLLVLLDYQGMLPVCPLLPGTSTTSTGPCKTCTIPAQGTSMFPSCCCTKPSDGNCTCIPIPSSWAFARFLWEWASVRFSWLSLLVPFVQWFVGLSPTVWLSVIWMMWYWGPSLYNILNPFLPLLPIFFCLWVYI

SEQ ID NO: 205 - protein, 1519 aa, synthetic construct
  REGION 1..1519: note = Recombinant Sequence
MFVFLVLLPLVSSQCVNLTTRTQLPPAYTNSFTRGVYYPDKVFRSSVLHSTQDLFLPFFSNVTWFHAIHVSGTNGTKRFDNPVLPFNDGVYFASTEKSNIIRGWIFGTTLDSKTQSLLIVNNATNVVIKVCEFQFCNDPFLGVYYHKNNKSWMESEFRVYSSANNCTFEYVSQPFLMDLEGKQGNFKNLREFVFKNIDGYFKIYSKHTPINLVRDLPQGFSALEPLVDLPIGINITRFQTLLALHRSYLTPGDSSSGWTAGAAAYYVGYLQPRTFLLKYNENGTITDAVDCALDPLSETKCTLKSFTVEKGIYQTSNFRVQPTESIVRFPNITNLCPFGEVFNATRFASVYAWNRKRISNCVADYSVLYNSASFSTFKCYGVSPTKLNDLCFTNVYADSFVIRGDEVRQIAPGQTGKIADYNYKLPDDFTGCVIAWNSNNLDSKVGGNYNYLYRLFRKSNLKPFERDISTEIYQAGSTPCNGVKGFNCYFPLQSYGFQPTNGVGYQPYRVVVLSFELLHAPATVCGPKKSTNLVKNKCVNFNFNGLTGTGVLTESNKKFLPFQQFGRDIADTTDAVRDPQTLEILDITPCSFGGVSVITPGTNTSNQVAVLYQGVNCTEVPVAIHADQLTPTWRVYSTGSNVFQTRAGCLIGAEHVNNSYECDIPIGAGICASYQTQTNSPGSASSVASQSIIAYTMSLGAENSVAYSNNSIAIPTNFTISVTTEILPVSMTKTSVDCTMYICGDSTECSNLLLQYGSFCTQLNRALTGIAVEQDKNTQEVFAQVKQIYKTPPIKDFGGFNFSQILPDPSKPSKRSPIEDLLFNKVTLADAGFIKQYGDCLGDIAARDLICAQKFNGLTVLPPLLTDEMIAQYTSALLAGTITSGWTFGAGPALQIPFPMQMAYRFNGIGVTQNVLYENQKLIANQFNSAIGKIQDSLSSTPSALGKLQDVVNQNAQALNTLVKQLSSNFGAISSVLNDILSRLDPPEAEVQIDRLITGRLQSLQTYVTQQLIRAAEIRASANLAATKMSECVLGQSKRVDFCGKGYHLMSFPQSAPHGVVFLHVTYVPAQEKNFTTAPAICHDGKAHFPREGVFVSNGTHWFVTQRNFYEPQIITTDNTFVSGNCDVVIGIVNNTVYDPLQPELDSFKEELDKYFKNHTSPDVDLGDISGINASFVNIQKEIDRLNEVAKNLNESLIDLQELGKYGSGSGSGSGSGSGSGSGSGSGSGSGSGSGSGSMQWNSSTFHQALLDPRVRGLYFPAGGSSSGTVNPVPTTASPISSIFSRTGDPAPNMESTTSGFLGPLLALQAGFFLLTRILTIPQSLDSWWTSLNFLGGAPTCPGQNLQSPTSNHSPTSCPPICPGYRWMCLRRFIIFLFILLLCLIFLLVLLDYQGMLPVCPLLPGTSTTSTGPCKTCTIPAQGTSMFPSCCCTKPSDGNCTCIPIPSSWAFARFLWEWASVRFSWLSLLVPFVQWFVGLSPTVWLSVIWMMWYWGPSLYNILNPFLPLLPIFFCLWVYI

SEQ ID NO: 206 - protein, 1519 aa, synthetic construct
  REGION 1..1519: note = Recombinant Sequence
MFVFLVLLPLVSSQCVNLTTRTQLPPAYTNSFTRGVYYPDKVFRSSVLHSTQDLFLPFFSNVTWFHAIHVSGTNGTKRFDNPVLPFNDGVYFASTEKSNIIRGWIFGTTLDSKTQSLLIVNNATNVVIKVCEFQFCNDPFLGVYYHKNNKSWMESELRVYSSANNCTFEYVSQPFLMDLEGKQGNFKNLREFVFKNIDGYFKIYSKHTPINLVRDLPQGFSALEPLVDLPIGINITRFQTLLALHRSYLTPGDSSSGWTAGAAAYYVGYLQPRTFLLKYNENGTITDAVDCALDPLSETKCTLKSFTVEKGIYQTSNFRVQPTESIVRFPNITNLCPFGEVFNATRFASVYAWNRKRISNCVADYSFLYNSASFSTFKCYGVSPTKLNDLCFTNVYADSFVIRGDEVRQIAPGQTGKIADYNYKLPDDFTGCVIAWNSNNLDSKVGGNYNYLYRLFRKSNLKPFERDISTEIYQAGSTPCNGVEGFNCYFPLQSYGFQPTNGVGYQPYRVVVLSFELLHAPATVCGPKKSTNLVKNKCVNFNFNGLTGTGVLTESNKKFLPFQQFGRDIADTTDAVRDPQTLEILDITPCSFGGVSVITPGTNTSNQVAVLYHGVNCTEVPVAIHADQLTPTWRVYSTGSNVFQTRAGCLIGAEHVNNSYECDIPIGAGICASYQTQTNSRGSASSVASQSIIAYTMSLGAENSVAYSNNSIAIPTNFTISVTTEILPVSMTKTSVDCTMYICGDSTECSNLLLQYGSFCTQLNRALTGIAVEQDKNTQEVFAQVKQIYKTPPIKDFGGFNFSQILPDPSKPSKRSPIEDLLFNKVTLADAGFIKQYGDCLGDIAARDLICAQKFNGLTVLPPLLTDEMIAQYTSALLAGTITSGWTFGAGPALQIPFPMQMAYRFNGIGVTQNVLYENQKLIANQFNSAIGKIQDSLSSTPSALGKLQDVVNQNAQALNTLVKQLSSNFGAISSVLNDILSRLDPPEAEVQIDRLITGRLQSLQTYVTQQLIRAAEIRASANLAATKMSECVLGQSKRVDFCGKGYHLMSFPQSAPHGVVFLHVTYVPAQEKNFTTAPAICHDGKAHFPREGVFVSNGTHWFVTQRNFYEPQIITTDNTFVSGNCDVVIGIVNNTVYDPLQPELDSFKEELDKYFKNHTSPDVDLGDISGINASVVNIQKEIDRLNEVAKNLNESLIDLQELGKYGSGSGSGSGSGSGSGSGSGSGSGSGSGSGSGSMQWNSSTFHQALLDPRVRGLYFPAGGSSSGTVNPVPTTASPISSIFSRTGDPAPNMESTTSGFLGPLLALQAGFFLLTRILTIPQSLDSWWTSLNFLGGAPTCPGQNLQSPTSNHSPTSCPPICPGYRWMCLRRFIIFLFILLLCLIFLLVLLDYQGMLPVCPLLPGTSTTSTGPCKTCTIPAQGTSMFPSCCCTKPSDGNCTCIPIPSSWAFARFLWEWASVRFSWLSLLVPFVQWFVGLSPTVWLSVIWMMWYWGPSLYNILNPFLPLLPIFFCLWVYI

SEQ ID NO: 207 - protein, 1519 aa, synthetic construct
  REGION 1..1519: note = Recombinant Sequence
MFVFFVLLPLVSSQCVNLTTRTQLPPAYTNSFTRGVYYPDKVFRSSVLHSTQDLFLPFFSNVTWFHAIHVSGTNGTKRFDNPVLPFNDGVYFASIEKSNIIRGWIFGTTLDSKTQSLLIVNNATNVVIKVCEFQFCNDPFLGVYYHKNNKSWMESEFRVYSSANNCTFEYVSQPFLMDLEGKQGNFKNLREFVFKNIDGYFKIYSKHTPINLVRDLPQGFSALEPLVDLPIGINITRFQTLLALHRSYLTPGGSSSGWTAGAAAYYVGYLQPRTFLLKYNENGTITDAVDCALDPLSETKCTLKSFTVEKGIYQTSNFRVQPTESIVRFPNITNLCPFGEVFNATRFASVYAWNRKRISNCVADYSVLYNSASFSTFKCYGVSPTKLNDLCFTNVYADSFVIRGDEVRQIAPGQTGKIADYNYKLPDDFTGCVIAWNSNNLDSKVGGNYNYLYRLFRKSNLKPFERDISTEIYQAGNTPCNGVEGFNCYFPLQSYGFQPTNGVGYQPYRVVVLSFELLHAPATVCGPKKSTNLVKNKCVNFNFNGLTGTGVLTESNKKFLPFQQFGRDIADTTDAVRDPQTLEILDITPCSFGGVSVITPGTNTSNQVAVLYQGVNCTEVPVAIHADQLTPTWRVYSTGSNVFQTRAGCLIGAEHVNNSYECDIPIGAGICASYQTQTNSPGSASSVASQSIIAYTMSLGAENSVAYSNNSIAIPTNFTISVTTEILPVSMTKTSVDCTMYICGDSTECSNLLLQYGSFCTQLNRALTGIAVEQDKNTQEVFAQVKQIYKTPPIKDFGGFNFSQILPDPSKPSKRSPIEDLLFNKVTLADAGFIKQYGDCLGDIAARDLICAQKFNGLTVLPPLLTDEMIAQYTSALLAGTITSGWTFGAGPALQIPFPMQMAYRFNGIGVTQNVLYENQKLIANQFNSAIGKIQDSLSSTPSALGKLQDVVNQNARALNTLVKQLSSNFGAISSVLNDILSRLDPPEAEVQIDRLITGRLQSLQTYVTQQLIRAAEIRASANLAATKMSECVLGQSKRVDFCGKGYHLMSFPQSAPHGVVFLHVTYVPAQEKNFTTAPAICHDGKAHFPREGVFVSNGTHWFVTQRNFYEPQIITTDNTFVSGNCDVVIGIVNNTVYDPLQPELDSFKEELDKYFKNHTSPDVDLGDISGINASVVNIQKEIDRLNEVAKNLNESLIDLQELGKYGSGSGSGSGSGSGSGSGSGSGSGSGSGSGSGSMQWNSSTFHQALLDPRVRGLYFPAGGSSSGTVNPVPTTASPISSIFSRTGDPAPNMESTTSGFLGPLLALQAGFFLLTRILTIPQSLDSWWTSLNFLGGAPTCPGQNLQSPTSNHSPTSCPPICPGYRWMCLRRFIIFLFILLLCLIFLLVLLDYQGMLPVCPLLPGTSTTSTGPCKTCTIPAQGTSMFPSCCCTKPSDGNCTCIPIPSSWAFARFLWEWASVRFSWLSLLVPFVQWFVGLSPTVWLSVIWMMWYWGPSLYNILNPFLPLLPIFFCLWVYI

SEQ ID NO: 208 - protein, 1514 aa, synthetic construct
  REGION 1..1514: note = Recombinant Sequence
MFVFLVLLPLVSSQCVNLTTRTQLPPAYTNSFTRGVYYPDKVFRSSVLHSTQDLFLPFFSNVTWFHAIHVSGTNGTKRFDNPVLPFNDGVYFASTEKSNIIRGWIFGTTLDSKTQSLLIVNNATNVVIKVCEFQFCNDPFYYHKNNKSWMESEFRVYSSANNCTFEYVSQPFLMDLEGKQGNFKNLREFVFKNIDGYFKIYSKHTPINLVRDLPQGFSALEPLVDLPIGINITRFQTLLHRSYLTPGDSSSGWTAGAAACYVGYLQPRTFLLKYNENGTITDAVDCALDPLSETKCTLKSFTVEKGIYQTSNFRVQPTESIVRFPNITNLCPFGEVFNATRFASVYAWNRKRISNCVADYSVLYNSASFSTFKCYGVSPTKLNDLCFTNVYADSFVIRGDEVRQIAPGQTGKIADYNYKLPDDFTGCVIAWNSNNLDSKVGGNYNYLYRLFRKSNLKPFERDISTEIYQAGSTPCNGVKGFNCYFPLQSYGFQPTYGVGYQPYRVVVLSFELLHAPATVCGPKKSTNLVKNKCVNFNFNGLTGTGVLTESNKKFLPFQQFGRDIADTTDAVRDPQTLEILDITPCSFGGVSVITPGTNTSNQVAVLYQGVNCTEVPVAIHADQLTPTWRVYSTGSNVFQTRAGCLIGAEHVNNSYECDIPIGAGICASYQTQTNSHGSASSVASQSIIAYTMSLGAENSVAYSNNSIAIPTNFTISVTTEILPVSMTKTSVDCTMYICGDSTECSNLLLQYGSFCTQLNRALTGIAVEQDKNTQEVFAQVKQIYKTPPIKDFGGFNFSQILPDPSKPSKRSPIEDLLFNKVTLADAGFIKQYGDCLGDIAARDLICAQKFNGLTVLPPLLTDEMIAQYTSALLAGTITSGWTFGAGPALQIPFPMQMAYRFNGIGVTQNVLYENQKLIANQFNSAIGKIQDSLSSTPSALGKLQDVVNQNAQALNTLVKQLSSNFGAISSVLNDILSRLDPPEAEVQIDRLITGRLQSLQTYVTQQLIRAAEIRASANLAATKMSECVLGQSKRVDFCGKGYHLMSFPQSAPHGVVFLHVTYVPAQEKNFTTAPAICHDGKAHFPRKGVFVSNGTYWFVTQRNFYEPQIITTDNTFVSGNCDVVIGIVNNTVYDPLQPELDSFKEELDKYFKNHTSPDVDLGDISGINASFVNIQKEIDRLNEVAKNLNESLIDLQELGKYGSGSGSGSGSGSGSGSGSGSGSGSGSGSGSGSMQWNSSTFHQALLDPRVRGLYFPAGGSSSGTVNPVPTTASPISSIFSRTGDPAPNMESTTSGFLGPLLALQAGFFLLTRILTIPQSLDSWWTSLNFLGGAPTCPGQNLQSPTSNHSPTSCPPICPGYRWMCLRRFIIFLFILLLCLIFLLVLLDYQGMLPVCPLLPGTSTTSTGPCKTCTIPAQGTSMFPSCCCTKPSDGNCTCIPIPSSWAFARFLWEWASVRFSWLSLLVPFVQWFVGLSPTVWLSVIWMMWYWGPSLYNILNPFLPLLPIFFCLWVYI

SEQ ID NO: 209 - protein, 1519 aa, synthetic construct
  REGION 1..1519: note = Recombinant Sequence
MFVFLVLLPLVSSQCVNFTTRTQLPPAYTNSFTRGVYYPDKVFRSSVLHSTQDLFLPFFSNVTWFHAIHVSGTNGTKRFDNPVLPFNDGVYFASTEKSNIIRGWIFGTTLDSKTQSLLIVNNATNVVIKVCEFQFCNDPFLGVYYHKNNKSWMESEFRVYSSANNCTFEYVSQPFLMDLEGKQGNFKNLREFVFKNIDGYFKIYSKHTPINLVRDLPQGFSALEPLVDLPIGINITRFQTLLALHRSYLTPGDSSSGWTAGAAAYYVGYLQPRTFLLKYNENGTITDAVDCALDPLSETKCTLKSFTVEKGIYQTSNFRVQPTESIVRFPNITNLCPFGEVFNATRFASVYAWNRKRISNCVADYSVLYNSASFSTFKCYGVSPTKLNDLCFTNVYADSFVIRGDEVRQIAPGQTGKIADYNYKLPDDFTGCVIAWNSNNLDSKVGGNYNYRYRLFRKSNLKPFERDISTEIYQAGSTPCNGVEGFNCYFPLQSYGFQPTYGVGYQPYRVVVLSFELLHAPATVCGPKKSTNLVKNKCVNFNFNGLTGTGVLTESNKKFLPFQQFGRDIADTTDAVRDPQTLEILDITPCSFGGVSVITPGTNTSNQVAVLYQGVNCTEVPVAIHADQLTPTWRVYSTGSNVFQTRAGCLIGVEYVNNSYECDIPIGAGICASYQTQTNSPGSASSVASQSIIAYTMSLGAENSVAYSNNSIAIPTNFTISVTTEILPVSMTKTSVDCTMYICGDSTECSNLLLQYGSFCTQLNRALTGIAVEQDKNTQEVFAQVKQIYKTPPIKYFGGFNFSQILPDPSKPSKRSPIEDLLFNKVTLADAGFIKQYGDCLGDIAARDLICAQKFNGLTVLPPLLTDEMIAQYTSALLAGTITSGWTFGAGPALQIPFPMQMAYRFNGIGVTQNVLYENQKLIANQFNSAIGKIQDSLSSTPSALGKLQDVVNQNAQALNTLVKQLSSNFGAISSVLNDILSRLDPPEAEVQIDRLITGRLQSLQTYVTQQLIRAAEIRASANLAATKMSECVLGQSKRVDFCGKGYHLMSFPQSAPHGVVFLHVTYVPAQEKNFTTAPAICHDGKAHFPREGVFVSNGTHWFVTQRNFYEPQIITTDNTFVSGNCDVVIGIVNNTVYDPLQPELDSFKEELDKYFKNHTSPDVDLGDISGINASVVNIQKEIDRLNEVAKNLNESLIDLQELGKYGSGSGSGSGSGSGSGSGSGSGSGSGSGSGSGSMQWNSSTFHQALLDPRVRGLYFPAGGSSSGTVNPVPTTASPISSIFSRTGDPAPNMESTTSGFLGPLLALQAGFFLLTRILTIPQSLDSWWTSLNFLGGAPTCPGQNLQSPTSNHSPTSCPPICPGYRWMCLRRFIIFLFILLLCLIFLLVLLDYQGMLPVCPLLPGTSTTSTGPCKTCTIPAQGTSMFPSCCCTKPSDGNCTCIPIPSSWAFARFLWEWASVRFSWLSLLVPFVQWFVGLSPTVWLSVIWMMWYWGPSLYNILNPFLPLLPIFFCLWVYI

SEQ ID NO: 210 - protein, 1519 aa, synthetic construct
  REGION 1..1519: note = Recombinant Sequence
MFVFLVLLPLVSSQCVNLTTRTQLPPAYTNSFTRGVYYPDKVFRSSVLHSTQDLFLPFFSNVTWFHAIHVSGTNGTKRFDNPVLPFNDGVYFASTEKSNIIRGWIFGTTLDSKTQSLLIVNNATNVVIKVCEFQFCNDPFLGVYYHKNNKSWMESEFRVYSSANNCTFEYVSQPFLMDLEGKQGNFKNLREFVFKNIDGYFKIYSKHTPINLVRDLPQGFSALEPLVDLPIGINITRFQTLLALHRSYLTPGDSSSGWTAGAAAYYVGYLQPRTFLLKYNENGTITDAVDCALDPLSETKCTLKSFTVEKGIYQTSNFRVQPTESIVRFPNITNLCPFGEVFNATRFASVYAWNRKRISNCVADYSVLYNSASFSTFKCYGVSPTKLNDLCFTNVYADSFVIRGDEVRQIAPGQTGKIADYNYKLPDDFTGCVIAWNSNNLDSKVGGNYNYLYRLFRKSNLKPFERDISTEIYQAGSTPCNGVEGFNCYFPLQSYGFQPTTGVGYQPYRVVVLSFELLHAPATVCGPKKSTNLVKNKCVNFNFNGLTGTGVLTESNKKFLPFQQFGRDIADTTDAVRDPQTLEILDITPCSFGGVSVITPGTNTSNQVAVLYQDVNCTEVPVAIHADQLTPTWRVYSTGSNVFQTRAGCLIGAEHVNNSYECDIPIGAGICASYQTQTNSPGSASSVASQSIIAYTMSLGAENSVAYSNNSIAIPTNFTISVTTEILPVSMTKTSVDCTMYICGDSTECSNLLLQYGSFCTQLNRALTGIAVEQDKNTQEVFAQVKQIYKTPPIKDFGGFNFSQILPDPSKPSKRSPIEDLLFNKVTLADAGFIKQYGDCLGDIAARDLICAQKFNGLTVLPPLLTDEMIAQYTSALLAGTITSGWTFGAGPALQIPFPMQMAYRFNGIGVTQNVLYENQKLIANQFNSAIGKIQDSLSSTPSALGKLQDVVNQNAQALNTLVKQLSSNFGAISSVLNDILSRLDPPEAEVQIDRLITGRLQSLQTYVTQQLIRAAEIRASANLAATKMSECVLGQSKRVDFCGKGYHLMSFPQSAPHGVVFLHVTYVPAQEKNFTTAPAICHDGKAHFPREGVFVSNGTHWFVTQRNFYEPQIITTDNTFVSGNCDVVIGIVNNTVYDPLQPELDSFKEELDKYFKNHTSPDVDLGDISGINASVVNIQKEIDRLNEVAKNLNESLIDLQELGKYGSGSGSGSGSGSGSGSGSGSGSGSGSGSGSGSMQWNSSTFHQALLDPRVRGLYFPAGGSSSGTVNPVPTTASPISSIFSRTGDPAPNMESTTSGFLGPLLALQAGFFLLTRILTIPQSLDSWWTSLNFLGGAPTCPGQNLQSPTSNHSPTSCPPICPGYRWMCLRRFIIFLFILLLCLIFLLVLLDYQGMLPVCPLLPGTSTTSTGPCKTCTIPAQGTSMFPSCCCTKPSDGNCTCIPIPSSWAFARFLWEWASVRFSWLSLLVPFVQWFVGLSPTVWLSVIWMMWYWGPSLYNILNPFLPLLPIFFCLWVYI

SEQ ID NO: 211 - protein, 1519 aa, synthetic construct
  REGION 1..1519: note = Recombinant Sequence
MFVFFVLLPLVSSQCVNLTTRTQLPPAYTNSFTRGVYYPDKVFRSSVLHSTQDLFLPFFSNVTWFHAIHVSGTNGTKRFDNPVLPFNDGVYFASIEKSNIIRGWIFGTTLDSKTQSLLIVNNATNVVIKVCEFQFCNDPFLGVYYHKNNKSWMESEFRVYSSANNCTFEYVSQPFLMDLEGKQGNFKNLREFVFKNIDGYFKIYSKHTPINLVRDLPQGFSALEPLVDLPIGINITRFQTLLALHRSYLTPGGSSSGWTAGAAAYYVGYLQPRTFLLKYNENGTITDAVDCALDPLSETKCTLKSFTVEKGIYQTSNFRVQPTESIVRFPNITNLCPFGEVFNATRFASVYAWNRKRISNCVADYSVLYNSASFSTFKCYGVSPTKLNDLCFTNVYADSFVIRGDEVRQIAPGQTGKIADYNYKLPDDFTGCVIAWNSNNLDSKVGGNYNYLYRLFRKSNLKPFERDISTEIYQAGSTPCNGVEGFNCYFPLQSYGFQPTNGVGYQPYRVVVLSFELLHAPATVCGPKKSTNLVKNKCVNFNFNGLTGTGVLTESNKKFLPFQQFGRDIADTTDAVRDPQTLEILDITPCSFGGVSVITPGTNTSNQVAVLYQGVNCTEVPVAIHADQLTPTWRVYSTGSNVFQTRAGCLIGAEHVNNSYECDIPIGAGICASYQTQTNSPGSASSVASQSIIAYTMSLGVENSVAYSNNSIAIPTNFTISVTTEILPVSMTKTSVDCTMYICGDSTECSNLLLQYGSFCTQLNRALTGIAVEQDKNTQEVFAQVKQIYKTPPIKDFGGFNFSQILPDPSKPSKRSPIEDLLFNKVTLADAGFIKQYGDCLGDIAARDLICAQKFNGLTVLPPLLTDEMIAQYTSALLAGTITSGWTFGAGPALQIPFPMQMAYRFNGIGVTQNVLYENQKLIANQFNSAIGKIQDSLSSTPSALGKLQDVVNQNAQALNTLVKQLSSNFGAISSVLNDILSRLDPPEAEVQIDRLITGRLQSLQTYVTQQLIRAAEIRASANLAATKMSECVLGQSKRVDFCGKGYHLMSFPQSAPHGVVFLHVTYVPAQEKNFTTAPAICHDGKAHFPREGVFVSNGTHWFVTQRNFYEPQIITTDNTFVSGNCDVVIGIVNNTVYDPLQPELDSFKEELDKYFKNHTSPDVDLGDISGINASVVNIQKEIDRLNEVAKNLNESLIDLQELGKYGSGSGSGSGSGSGSGSGSGSGSGSGSGSGSGSMQWNSSTFHQALLDPRVRGLYFPAGGSSSGTVNPVPTTASPISSIFSRTGDPAPNMESTTSGFLGPLLALQAGFFLLTRILTIPQSLDSWWTSLNFLGGAPTCPGQNLQSPTSNHSPTSCPPICPGYRWMCLRRFIIFLFILLLCLIFLLVLLDYQGMLPVCPLLPGTSTTSTGPCKTCTIPAQGTSMFPSCCCTKPSDGNCTCIPIPSSWAFARFLWEWASVRFSWLSLLVPFVQWFVGLSPTVWLSVIWMMWYWGPSLYNILNPFLPLLPIFFCLWVYI

SEQ ID NO: 212 - protein, 1519 aa, synthetic construct
  REGION 1..1519: note = Recombinant Sequence
MFVFLVLLPLVSSQCVNLTTRTQLPPAYTNSFTRGVYYPDKVFRSSVLHSTQDLFLPFFSNVTWFHAIHVSGTNGTKRFDNPVLPFNDGVYFASTEKSNIIRGWIFGTTLDSKTQSLLIVNNATNVVIKVCEFQFCNDPFLSVYYHKNNKSWMESEFRVYSSANNCTFEYVSQPFLMDLVGKQGNFKNLREFVFKNIDGYFKIYSKHTPINLVRDLPQGFSALEPLVDLPIGINITRFQTLLALHRSYLTPGDSSSGWTAGAAAYYVGYLQPRTFLLKYNENGTITDAVDCALDPLSETKCTLKSFTVEKGIYQTSNFRVQPTESIVRFPNITNLCPFGEVFNATRFASVYAWNRKRISNCVADYSVLYNSASFSTFKCYGVSPTKLNDLCFTNVYADSFVIRGDEVRQIAPGQTGKIADYNYKLPDDFTGCVIAWNSNNLDSKVGGNYNYLYRLFRKSNLKPFERDISTEIYQAGSTPCNGVEGFNCYFPLQSYGFQPTNGVGYQPYRVVVLSFELLHAPATVCGPKKSTNLVKNKCVNFNFNGLTGTGVLTESNKKFLPFQQFGRDIADTTDAVRDPQTLEILDITPCSFGGVSVITPGTNTSNQVAVLYQGVNCTEVPVAIHADQLTPTWRVYSTGSNVFQTRAGCLIGAEHVNNSYECDIPIGAGICASYQTHTNSPGSASSVASQSIIAYTMSLGAENSVAYSNNSIAIPTNFTISVTTEILPVSMTKTSVDCTMYICGDSTECSNLLLQYGSFCTQLNRALTGIAVEQDKNTQEVFAQVKQIYKTPPIKDFGGFNFSQILPDPSKPSKRSPIEDLLFNKVTLADAGFIKQYGDCLGDIAARDLICAQKFNGLTVLPPLLTDEMIAQYTSALLAGTITSGWTFGAGPALQIPFPMQMAYRFNGIGVTQNVLYENQKLIANQFNSAIGKIQDSLSSTPSALGKLQDVVNQNAQALNTLVKQLSSNFGAISSVLNDILSRLDPPEAEVQIDRLITGRLQSLQTYVTQQLIRAAEIRASANLAATKMSECVLGQSKRVDFCGKGYHLMSFPQSAPHGVVFLHVTYVPAQEKNFTTAPAICHDGKAHFPREGVFVSNGTHWFVTQRNFYEPQIITTDNTFVSGNCDVVIGIVNNTVYDPLQPELDSFKEELDKYFKNHTSPDVDLGDISGINASVVNIQKEIDRLNEVAKNLNESLIDLQELGKYGSGSGSGSGSGSGSGSGSGSGSGSGSGSGSGSMQWNSSTFHQALLDPRVRGLYFPAGGSSSGTVNPVPTTASPISSIFSRTGDPAPNMESTTSGFLGPLLALQAGFFLLTRILTIPQSLDSWWTSLNFLGGAPTCPGQNLQSPTSNHSPTSCPPICPGYRWMCLRRFIIFLFILLLCLIFLLVLLDYQGMLPVCPLLPGTSTTSTGPCKTCTIPAQGTSMFPSCCCTKPSDGNCTCIPIPSSWAFARFLWEWASVRFSWLSLLVPFVQWFVGLSPTVWLSVIWMMWYWGPSLYNILNPFLPLLPIFFCLWVYI

SEQ ID NO: 213 - protein, 1519 aa, synthetic construct
  REGION 1..1519: note = Recombinant Sequence
MFVFLVLLPLVSSQCVNLTTRTQLPPAYTNSFTRGVYYPDKVFRSSVLHSTQDLFLPFFSNVTWFHAIHVSGTNGTKRFDNPVLPFNDGVYFASTEKSNIIRGWIFGTTLDSKTQSLLIVNNATNVVIKVCEFQFCNDPFLGVYYHKNNKSWMESEFRVYSSANNCTFEYVSQPFLMDLEGKQGNFKNLREFVFKNIDGYFKIYSKHTPINLVRDLPQGFSALEPLVDLPIGINITRFQTLLALHRSYLTPGDSSSGWTAGAAAYYVGYLQPRTFLLKYNENGTITDAVDCALDPLSETKCTLKSFTVEKGIYQTSNFRVQPTESIVRFPNITNLCPFGEVFNATRFASVYAWNRKRISNCVADYSVLYNSASFSTFKCYGVSPTKLNDLCFTNVYADSFVIRGDEVRQIAPGQTGKIADYNYKLPDDFTGCVIAWNSNNLDSKVGGNYNYLYRLFRKSNLKPFERDISTEIYQAGSTPCNGVKGFNCYFPLQPYGFQPTYGVGYQPYRVVVLSFELLHAPATVCGPKKSTNLVKNKCVNFNFNGLTGTGVLTESNKKFLPFQQFGRDIADTTDAVRDPQTLEILDITPCSFGGVSVITPGTNTSNQVAVLYQGVNCTEVPVAIHADQLTPTWRVYSTGSNVFQTRAGCLIGAEHVNNSYECDIPIGAGICASYQTQTNSHGSASSVASQSIIAYTMSLGAENSVAYSNNSIAIPTNFTISVTTEILPVSMTKTSVDCTMYICGDSTECSNLLLQYGSFCTQLNRALTGIAVEQDKNTQEVFAQVKQIYKTPPIKDFGGFNFSQILPDPSKPSKRSPIEDLLFNKVTLADAGFIKQYGDCLGDIAARDLICAQKFNGLTVLPPLLTDEMIAQYTSALLAGTITSGWTFGAGPALQIPFPMQMAYRFNGIGVTQNVLYENQKLIANQFNSAIGKIQDSLSSTPSALGKLQDVVNQNAQALNTLVKQLSSNFGAISSVLNDILSRLDPPEAEVQIDRLITGRLQSLQTYVTQQLIRAAEIRASANLAATKMSECVLGQSKRVDFCGKGYHLMSFPQSAPHGVVFLHVTYVPAQEKNFTTAPAICHDGKAHFPREGVFVSNGTHWFVTQRNFYKPQIITTDNTFVSGNCDVVIGIVNNTVYDPLQPELDSFKEELDKYFKNHTSPDVDLGDISGINASVVNIQKEIDRLNEVAKNLNESLIDLQELGKYGSGSGSGSGSGSGSGSGSGSGSGSGSGSGSGSMQWNSSTFHQALLDPRVRGLYFPAGGSSSGTVNPVPTTASPISSIFSRTGDPAPNMESTTSGFLGPLLALQAGFFLLTRILTIPQSLDSWWTSLNFLGGAPTCPGQNLQSPTSNHSPTSCPPICPGYRWMCLRRFIIFLFILLLCLIFLLVLLDYQGMLPVCPLLPGTSTTSTGPCKTCTIPAQGTSMFPSCCCTKPSDGNCTCIPIPSSWAFARFLWEWASVRFSWLSLLVPFVQWFVGLSPTVWLSVIWMMWYWGPSLYNILNPFLPLLPIFFCLWVYI

SEQ ID NO: 214 - protein, 1518 aa, synthetic construct
  REGION 1..1518: note = Recombinant Sequence
MFVFLVLLPLVSSQCVNLTTRTQLPPAYTNSFTRGVYYPDKVFRSSVLHSTQDLFLPFFSNVTWFDAIHVSGTNGTKRFDNPVLPFNDGVYFASTEKSNIIRGWIFGTTLDSKTQSLLIVNNATNVVIKVCEFQFCNDPFLVVYHKNNKSWMESEFRVYSSANNCTFEYVSQPFLMDLEGKQGNFKNLREFVFKNIDGYFKIYSKHTPINLVRGLPQGFSALEPLVDLPIGINITRFQTLLALHRSYLTPGDSSSGWTAGAAAYYVGYLQPRTFLLKYNENGTITDAVDCALDPLSETKCTLKSFTVEKGIYQTSNFRVQPTESIVRFPNITNLCPFGEVFNATRFASVYAWNRKRISNCVADYSVLYNSASFSTFKCYGVSPTKLNDLCFTNVYADSFVIRGDEVRQIAPGQTGKIADYNYKLPDDFTGCVIAWNSNNLDSKVGGNYNYLYRLFRKSNLKPFERDISTEIYQAGSTPCNGAEGFNCYFPLQSYGFQPTNGVGYQPYRVVVLSFELLHAPATVCGPKKSTNLVKNKCVNFNFNGLTGTGVLTESNKKFLPFQQFGRDIADTTDAVRDPQTLEILDITPCSFGGVSVITPGTNTSNQVAVLYQDVNCTEVPVAIHADQLTPTWRVYSTGSNVFQTRAGCLIGAEYVNNSYECDIPIGASICASYQTQTNSPGSASSVASQSIIAYTMSLGAENSVAYSNNSIAIPTNFTISVTTEILPVSMTKTSVDCTMYICGDSTECSNLLLQYGSFCTQLNRALTGIAVEQDKNTQEVFAQVKQIYKTPPIKDFGGFNFSQILPDPSKPSKRSPIEDLLFNKVTLADAGFIKQYGDCLGDIAARDLICAQKFNGLTVLPPLLTDEMIAQYTSALLAGTITSGWTFGAGPALQIPFPMQMAYRFNGIGVTQNVLYENQKLIANQFNSAIGKIQDSLSSTPSALGKLRDVVNQNAQALNTLVKQLSSNFGAISSVLNDILSRLDPPEAEVQIDRLITGRLQSLQTYVTQQLIRAAEIRASANLAATKMSECVLGQSKRVDFCGKGYHLMSFPQSAPHGVVFLHVTYVPAQEKNFTTAPAICHDGKDHFPREGVFVSNGTHWFVTQRNFYEPQIITTDNTFVSGNCDVVIGIVNNTVYDPLQPELDSFKEELDKYFKNHTSPDVDLGDISGINASVVNIQKEIDRLNEVAKNLNESLIDLQELGKYGSGSGSGSGSGSGSGSGSGSGSGSGSGSGSGSMQWNSSTFHQALLDPRVRGLYFPAGGSSSGTVNPVPTTASPISSIFSRTGDPAPNMESTTSGFLGPLLALQAGFFLLTRILTIPQSLDSWWTSLNFLGGAPTCPGQNLQSPTSNHSPTSCPPICPGYRWMCLRRFIIFLFILLLCLIFLLVLLDYQGMLPVCPLLPGTSTTSTGPCKTCTIPAQGTSMFPSCCCTKPSDGNCTCIPIPSSWAFARFLWEWASVRFSWLSLLVPFVQWFVGLSPTVWLSVIWMMWYWGPSLYNILNPFLPLLPIFFCLWVYI

SEQ ID NO: 215 - protein, 1519 aa, synthetic construct
  REGION 1..1519: note = Recombinant Sequence
MFVFLVLLPLVSSQCVNLTTRTQLPPAYTNSFTRGVYYPDKVFRSSVLHSTQDLFLPFFSNVTWFHAIHVSGTNGTKRFDNPVLPFNDGVYFASTEKSNIIRGWIFGTTLDSKTQSLLIVNNATNVVIKVCEFQFCNDPFLGVYYHKNNKSWMESEFRVYSSANNCTFEYVSQPFLMDLEGKQGNFKNLREFVFKNIDGYFKIYSKHTPINLVRDLPQGFSALEPLVDLPIGINITRFQTLLALHRSYLTPGDSSSGWTAGAAAYYVGYLQPRTFLLKYNENGTITDAVDCALDPLSETKCTLKSFTVEKGIYQTSNFRVQPTESIVRFPNITNLCPFGEVFNATRFASVYAWNRKRISNCVADYSVLYNSASFSTFKCYGVSPTKLNDLCFTNVYADSFVIRGDEVRQIAPGQTGKIADYNYKLPDDFTGCVIAWNSNNLDSKVGGNYNYLYRLFRKSNLKPFERDISTEIYQAGSTPCNGVEGFNCYFPLQPYGFQPTNGVGYQPYRVVVLSFELLHAPATVCGPKKSTNLVKNKCVNFNFNGLTGTGVLTESNKKFLPFQQFGRDIADTTDAVRDPQTLEILDITPCSFGGVSVITPGTNTSNQVAVLYQGVNCTEVPVAIHADQLTPTWRVYSTGSNVFQTRAGCLIGAEHVNNSYECDIPIGAGICASYQTQTNSHGSASSVASQSIIAYTMSLGAENSVAYSNNSIAIPINFTISVTTEILPVSMTKTSVDCTMYICGDSTECSNLLLQYGSFCTQLNRALTGIAVEQDKNTQEVFAQVKQIYKTPPIKDFGGFNFSQILPDPSKPSKRSPIEDLLFNKVTLADAGFIKQYGDCLGDIAARDLICAQKFNGLTVLPPLLTDEMIAQYTSALLAGTITSGWTFGAGPALQIPFPMQMAYRFNGIGVTQNVLYENQKLIANQFNSAIGKIQDSLSSTPSALGKLQDVVNQNAQALNTLVKQLSSNFGAISSVLNDILSRLDPPEAEVQIDRLITGRLQSLQTYVTQQLIRAAEIRASANLAATKMSECVLGQSKRVDFCGKGYHLMSFPQSAPHGVVFLHVTYVPAQEKNFTTAPAICHDGKAHFPREGVFVSNGTHWFVTQRNFYEPQIITTDNTFVSGNCDVVIGIVNNTVYDPLQPELDSFKEELDKYFKNHTSPDVDLGDISGINASVVNIQKEIDRLNEVAKNLNESLIDLQELGKYGSGSGSGSGSGSGSGSGSGSGSGSGSGSGSGSMQWNSSTFHQALLDPRVRGLYFPAGGSSSGTVNPVPTTASPISSIFSRTGDPAPNMESTTSGFLGPLLALQAGFFLLTRILTIPQSLDSWWTSLNFLGGAPTCPGQNLQSPTSNHSPTSCPPICPGYRWMCLRRFIIFLFILLLCLIFLLVLLDYQGMLPVCPLLPGTSTTSTGPCKTCTIPAQGTSMFPSCCCTKPSDGNCTCIPIPSSWAFARFLWEWASVRFSWLSLLVPFVQWFVGLSPTVWLSVIWMMWYWGPSLYNILNPFLPLLPIFFCLWVYI

SEQ ID NO: 216 - protein, 1622 aa, synthetic construct
  REGION 1..1622: note = Recombinant Sequence
MFVFLVLLPLVSSQCVNLTTRTQLPPAYTNSFTRGVYYPDKVFRSSVLHSTQDLFLPFFSNVTWFHAIHVSGTNGTKRFDNPVLPFNDGVYFASTEKSNIIRGWIFGTTLDSKTQSLLIVNNATNVVIKVCEFQFCNDPFLGVYYHKNNKSWMESEFRVYSSANNCTFEYVSQPFLMDLEGKQGNFKNLREFVFKNIDGYFKIYSKHTPINLVRDLPQGFSALEPLVDLPIGINITRFQTLLALHRSYLTPGDSSSGWTAGAAAYYVGYLQPRTFLLKYNENGTITDAVDCALDPLSETKCTLKSFTVEKGIYQTSNFRVQPTESIVRFPNITNLCPFGEVFNATRFASVYAWNRKRISNCVADYSVLYNSASFSTFKCYGVSPTKLNDLCFTNVYADSFVIRGDEVRQIAPGQTGKIADYNYKLPDDFTGCVIAWNSNNLDSKVGGNYNYLYRLFRKSNLKPFERDISTEIYQAGSTPCNGVEGFNCYFPLQSYGFQPTNGVGYQPYRVVVLSFELLHAPATVCGPKKSTNLVKNKCVNFNFNGLTGTGVLTESNKKFLPFQQFGRDIADTTDAVRDPQTLEILDITPCSFGGVSVITPGTNTSNQVAVLYQDVNCTEVPVAIHADQLTPTWRVYSTGSNVFQTRAGCLIGAEHVNNSYECDIPIGAGICASYQTQTNSPGSASSVASQSIIAYTMSLGAENSVAYSNNSIAIPTNFTISVTTEILPVSMTKTSVDCTMYICGDSTECSNLLLQYGSFCTQLNRALTGIAVEQDKNTQEVFAQVKQIYKTPPIKDFGGFNFSQILPDPSKPSKRSPIEDLLFNKVTLADAGFIKQYGDCLGDIAARDLICAQKFNGLTVLPPLLTDEMIAQYTSALLAGTITSGWTFGAGPALQIPFPMQMAYRFNGIGVTQNVLYENQKLIANQFNSAIGKIQDSLSSTPSALGKLQDVVNQNAQALNTLVKQLSSNFGAISSVLNDILSRLDPPEAEVQIDRLITGRLQSLQTYVTQQLIRAAEIRASANLAATKMSECVLGQSKRVDFCGKGYHLMSFPQSAPHGVVFLHVTYVPAQEKNFTTAPAICHDGKAHFPREGVFVSNGTHWFVTQRNFYEPQIITTDNTFVSGNCDVVIGIVNNTVYDPLQPELDSFKEELDKYFKNHTSPDVDLGDISGINASVVNIQKEIDRLNEVAKNLNESLIDLQELGKYGSGSGSGSGSGSGSGSMGGWSSKPRQGMGTNLSVPNPLGFFPDHQLDPAFGANSNNPDWDFNPNKDQWPEANQVGAGAFGPGFTPPHGGLLGWSPQAQGILTTVPAAPPPASTNRQSGRQPTPISPPLRDSHPQAMQWNSTTFHQALLDPRVRGLYFPAGGSSSGTVNPVPTTASPISSIFSRTGDPAPNMENTTSGFLGPLLVLQAGFFLLTRILTIPQSLDSWWTSLNFLGGAPTCPGQNSQSPTSNHSPTSCPPICPGYRWMCLRRFIIFLFILLLCLIFLLVLLDYQGMLPVCPLLPGTSTTSTGPCKTCTIPAQGTSMFPSCCCTKPSDGNCTCIPIPSSWAFARFLWEWASVRFSWLSLLVPFVQWFVGLSPTVWLSVIWMMWYWGPSLYNILSPFLPLLPIFFCLWVYI

SEQ ID NO: 217 - protein, 1620 aa, synthetic construct
  REGION 1..1620: note = Recombinant Sequence
MFVFLVLLPLVSSQCVNLRTRTQLPPAYTNSFTRGVYYPDKVFRSSVLHSTQDLFLPFFSNVTWFHAIHVSGTNGTKRFDNPVLPFNDGVYFASTEKSNIIRGWIFGTTLDSKTQSLLIVNNATNVVIKVCEFQFCNDPFLDVYYHKNNKSWMESGVYSSANNCTFEYVSQPFLMDLEGKQGNFKNLREFVFKNIDGYFKIYSKHTPINLVRDLPQGFSALEPLVDLPIGINITRFQTLLALHRSYLTPGDSSSGWTAGAAAYYVGYLQPRTFLLKYNENGTITDAVDCALDPLSETKCTLKSFTVEKGIYQTSNFRVQPTESIVRFPNITNLCPFGEVFNATRFASVYAWNRKRISNCVADYSVLYNSASFSTFKCYGVSPTKLNDLCFTNVYADSFVIRGDEVRQIAPGQTGKIADYNYKLPDDFTGCVIAWNSNNLDSKVGGNYNYRYRLFRKSNLKPFERDISTEIYQAGSKPCNGVEGFNCYFPLQSYGFQPTNGVGYQPYRVVVLSFELLHAPATVCGPKKSTNLVKNKCVNFNFNGLTGTGVLTESNKKFLPFQQFGRDIADTTDAVRDPQTLEILDITPCSFGGVSVITPGTNTSNQVAVLYQGVNCTEVPVAIHADQLTPTWRVYSTGSNVFQTRAGCLIGAEHVNNSYECDIPIGAGICASYQTQTNSRGSASSVASQSIIAYTMSLGAENSVAYSNNSIAIPTNFTISVTTEILPVSMTKTSVDCTMYICGDSTECSNLLLQYGSFCTQLNRALTGIAVEQDKNTQEVFAQVKQIYKTPPIKDFGGFNFSQILPDPSKPSKRSPIEDLLFNKVTLADAGFIKQYGDCLGDIAARDLICAQKFNGLTVLPPLLTDEMIAQYTSALLAGTITSGWTFGAGPALQIPFPMQMAYRFNGIGVTQNVLYENQKLIANQFNSAIGKIQDSLSSTPSALGKLQNVVNQNAQALNTLVKQLSSNFGAISSVLNDILSRLDPPEAEVQIDRLITGRLQSLQTYVTQQLIRAAEIRASANLAATKMSECVLGQSKRVDFCGKGYHLMSFPQSAPHGVVFLHVTYVPAQEKNFTTAPAICHDGKAHFPREGVFVSNGTHWFVTQRNFYEPQIITTDNTFVSGNCDVVIGIVNNTVYDPLQPELDSFKEELDKYFKNHTSPDVDLGDISGINASVVNIQKEIDRLNEVAKNLNESLIDLQELGKYGSGSGSGSGSGSGSGSMGGWSSKPRQGMGTNLSVPNPLGFFPDHQLDPAFGANSNNPDWDFNPNKDQWPEANQVGAGAFGPGFTPPHGGLLGWSPQAQGILTTVPAAPPPASTNRQSGRQPTPISPPLRDSHPQAMQWNSTTFHQALLDPRVRGLYFPAGGSSSGTVNPVPTTASPISSIFSRTGDPAPNMENTTSGFLGPLLVLQAGFFLLTRILTIPQSLDSWWTSLNFLGGAPTCPGQNSQSPTSNHSPTSCPPICPGYRWMCLRRFIIFLFILLLCLIFLLVLLDYQGMLPVCPLLPGTSTTSTGPCKTCTIPAQGTSMFPSCCCTKPSDGNCTCIPIPSSWAFARFLWEWASVRFSWLSLLVPFVQWFVGLSPTVWLSVIWMMWYWGPSLYNILSPFLPLLPIFFCLWVYI

SEQ ID NO: 218 - protein, 1620 aa, synthetic construct
  REGION 1..1620: note = Recombinant Sequence
MFVFLVLLPLVSSQCVNLRTRTQLPPAYTNSFTRGVYYPDKVFRSSVLHSTQDLFLPFFSNVTWFHAIHFSGTNGTKRFDNPVLPFNDGVYFASIEKSNIIRGWIFGTTLDSKTQSLLIVNNATNVVIKVCEFQFCNDPFLDVYYHKNNKSWMESGVYSSANNCTFEYVSQPFLMDLEGKQGNFKNLREFVFKNIDGYFKIYSKHTPINLVRDLPQGFSVLEPLVDLPIGINITRFQTLLALHRSYLTPGDSSSGLTAGAAAYYVGYLQPRTFLLKYNENGTITDAVDCALDPLSETKCTLKSFTVEKGIYQTSNFRVQPTESIVRFPNITNLCPFGEVFNATRFASVYAWNRKRISNCVADYSVLYNSASFSTFKCYGVSPTKLNDLCFTNVYADSFVIRGDEVRQIAPGQTGNIADYNYKLPDDFTGCVIAWNSNNLDSKVGGNYNYRYRLFRKSNLKPFERDISTEIYQAGSKPCNGVEGFNCYFPLQSYGFQPTNGVGYQPYRVVVLSFELLHAPATVCGPKKSTNLVKNKCVNFNFNGLTGTGVLTESNKKFLPFQQFGRDIADTTDAVRDPQTLEILDITPCSFGGVSVITPGTNTSNQVAVLYQGVNCTEVPVAIHADQLTPTWRVYSTGSNVFQTRAGCLIGAEHVNNSYECDIPIGAGICASYQTQTNSRGSASSVASQSIIAYTMSLGAENSVAYSNNSIAIPTNFTISVTTEILPVSMTKTSVDCTMYICGDSTECSNLLLQYGSFCTQLNRALTGIAVEQDKNTQEVFAQVKQIYKTPPIKDFGGFNFSQILPDPSKPSKRSPIEDLLFNKVTLADAGFIKQYGDCLGDIAARDLICAQKFNGLTVLPPLLTDEMIAQYTSALLAGTITSGWTFGAGPALQIPFPMQMAYRFNGIGVTQNVLYENQKLIANQFNSAIGKIQDSLSSTPSALGKLQNVVNQNAQALNTLVKQLSSNFGAISSVLNDILSRLDPPEAEVQIDRLITGRLQSLQTYVTQQLIRAAEIRASANLAATKMSECVLGQSKRVDFCGKGYHLMSFPQSAPHGVVFLHVTYVPAQEKNFTTAPAICHDGKAHFPREGVFVSNGTHWFVTQRNFYEPQIITTDNTFVSGNCDVVIGIVNNTVYDPLQPELDSFKEELDKYFKNHTSPDVDLGDISGINASVVNIQKEIDRLNEVAKNLNESLIDLQELGKYGSGSGSGSGSGSGSGSMGGWSSKPRQGMGTNLSVPNPLGFFPDHQLDPAFGANSNNPDWDFNPNKDQWPEANQVGAGAFGPGFTPPHGGLLGWSPQAQGILTTVPAAPPPASTNRQSGRQPTPISPPLRDSHPQAMQWNSTTFHQALLDPRVRGLYFPAGGSSSGTVNPVPTTASPISSIFSRTGDPAPNMENTTSGFLGPLLVLQAGFFLLTRILTIPQSLDSWWTSLNFLGGAPTCPGQNSQSPTSNHSPTSCPPICPGYRWMCLRRFIIFLFILLLCLIFLLVLLDYQGMLPVCPLLPGTSTTSTGPCKTCTIPAQGTSMFPSCCCTKPSDGNCTCIPIPSSWAFARFLWEWASVRFSWLSLLVPFVQWFVGLSPTVWLSVIWMMWYWGPSLYNILSPFLPLLPIFFCLWVYI

SEQ ID NO: 219 - protein, 1619 aa, synthetic construct
  REGION 1..1619: note = Recombinant Sequence
MFVFLVLLPLVSSQCVNLTTRTQLPPAYTNSFTRGVYYPDKVFRSSVLHSTQDLFLPFFSNVTWFHAISGTNGTKRFDNPVLPFNDGVYFASTEKSNIIRGWIFGTTLDSKTQSLLIVNNATNVVIKVCEFQFCNDPFLGVYHKNNKSWMESEFRVYSSANNCTFEYVSQPFLMDLEGKQGNFKNLREFVFKNIDGYFKIYSKHTPINLVRDLPQGFSALEPLVDLPIGINITRFQTLLALHRSYLTPGDSSSGWTAGAAAYYVGYLQPRTFLLKYNENGTITDAVDCALDPLSETKCTLKSFTVEKGIYQTSNFRVQPTESIVRFPNITNLCPFGEVFNATRFASVYAWNRKRISNCVADYSVLYNSASFSTFKCYGVSPTKLNDLCFTNVYADSFVIRGDEVRQIAPGQTGKIADYNYKLPDDFTGCVIAWNSNNLDSKVGGNYNYLYRLFRKSNLKPFERDISTEIYQAGSTPCNGVEGFNCYFPLQSYGFQPTYGVGYQPYRVVVLSFELLHAPATVCGPKKSTNLVKNKCVNFNFNGLTGTGVLTESNKKFLPFQQFGRDIDDTTDAVRDPQTLEILDITPCSFGGVSVITPGTNTSNQVAVLYQGVNCTEVPVAIHADQLTPTWRVYSTGSNVFQTRAGCLIGAEHVNNSYECDIPIGAGICASYQTQTNSHGSASSVASQSIIAYTMSLGAENSVAYSNNSIAIPINFTISVTTEILPVSMTKTSVDCTMYICGDSTECSNLLLQYGSFCTQLNRALTGIAVEQDKNTQEVFAQVKQIYKTPPIKDFGGFNFSQILPDPSKPSKRSPIEDLLFNKVTLADAGFIKQYGDCLGDIAARDLICAQKFNGLTVLPPLLTDEMIAQYTSALLAGTITSGWTFGAGPALQIPFPMQMAYRFNGIGVTQNVLYENQKLIANQFNSAIGKIQDSLSSTPSALGKLQDVVNQNAQALNTLVKQLSSNFGAISSVLNDILARLDPPEAEVQIDRLITGRLQSLQTYVTQQLIRAAEIRASANLAATKMSECVLGQSKRVDFCGKGYHLMSFPQSAPHGVVFLHVTYVPAQEKNFTTAPAICHDGKAHFPREGVFVSNGTHWFVTQRNFYEPQIITTHNTFVSGNCDVVIGIVNNTVYDPLQPELDSFKEELDKYFKNHTSPDVDLGDISGINASVVNIQKEIDRLNEVAKNLNESLIDLQELGKYGSGSGSGSGSGSGSGSMGGWSSKPRQGMGTNLSVPNPLGFFPDHQLDPAFGANSNNPDWDFNPNKDQWPEANQVGAGAFGPGFTPPHGGLLGWSPQAQGILTTVPAAPPPASTNRQSGRQPTPISPPLRDSHPQAMQWNSTTFHQALLDPRVRGLYFPAGGSSSGTVNPVPTTASPISSIFSRTGDPAPNMENTTSGFLGPLLVLQAGFFLLTRILTIPQSLDSWWTSLNFLGGAPTCPGQNSQSPTSNHSPTSCPPICPGYRWMCLRRFIIFLFILLLCLIFLLVLLDYQGMLPVCPLLPGTSTTSTGPCKTCTIPAQGTSMFPSCCCTKPSDGNCTCIPIPSSWAFARFLWEWASVRFSWLSLLVPFVQWFVGLSPTVWLSVIWMMWYWGPSLYNILSPFLPLLPIFFCLWVYI

SEQ ID NO: 220 - protein, 1619 aa, synthetic construct
  REGION 1..1619: note = Recombinant Sequence
MFVFLVLLPLVSSQCVNLTTRTQLPPAYTNSFTRGVYYPDKVFRSSVLHSTQDLFLPFFSNVTWFHAISGTNGTKRFDNPVLPFNDGVYFASTEKSNIIRGWIFGTTLDSKTQSLLIVNNATNVVIKVCEFQFCNDPFLGVYHKNNKSWMESEFRVYSSANNCTFEYVSQPFLMDLEGKQGNFKNLREFVFKNIDGYFKIYSKHTPINLVRDLPQGFSALEPLVDLPIGINITRFQTLLALHRSYLTPGDSSSGWTAGAAAYYVGYLQPRTFLLKYNENGTITDAVDCALDPLSETKCTLKSFTVEKGIYQTSNFRVQPTESIVRFPNITNLCPFGEVFNATRFASVYAWNRKRISNCVADYSVLYNSASFSTFKCYGVSPTKLNDLCFTNVYADSFVIRGDEVRQIAPGQTGKIADYNYKLPDDFTGCVIAWNSNNLDSKVGGNYNYLYRLFRKSNLKPFERDISTEIYQAGSTPCNGVKGFNCYFPLQPYGFQPTYGVGYQPYRVVVLSFELLHAPATVCGPKKSTNLVKNKCVNFNFNGLTGTGVLTESNKKFLPFQQFGRDIDDTTDAVRDPQTLEILDITPCSFGGVSVITPGTNTSNQVAVLYQGVNCTEVPVAIHADQLTPTWRVYSTGSNVFQTRAGCLIGAEHVNNSYECDIPIGAGICASYQTQTNSHGSASSVASQSIIAYTMSLGAENSVAYSNNSIAIPINFTISVTTEILPVSMTKTSVDCTMYICGDSTECSNLLLQYGSFCTQLNRALTGIAVEQDKNTQEVFAQVKQIYKTPPIKDFGGFNFSQILPDPSKPSKRSPIEDLLFNKVTLADAGFIKQYGDCLGDIAARDLICAQKFNGLTVLPPLLTDEMIAQYTSALLAGTITSGWTFGAGPALQIPFPMQMAYRFNGIGVTQNVLYENQKLIANQFNSAIGKIQDSLSSTPSALGKLQDVVNQNAQALNTLVKQLSSNFGAISSVLNDILARLDPPEAEVQIDRLITGRLQSLQTYVTQQLIRAAEIRASANLAATKMSECVLGQSKRVDFCGKGYHLMSFPQSAPHGVVFLHVTYVPAQEKNFTTAPAICHDGKAHFPREGVFVSNGTHWFVTQRNFYEPQIITTHNTFVSGNCDVVIGIVNNTVYDPLQPELDSFKEELDKYFKNHTSPDVDLGDISGINASVVNIQKEIDRLNEVANNLNESLIDLQELGKYGSGSGSGSGSGSGSGSMGGWSSKPRQGMGTNLSVPNPLGFFPDHQLDPAFGANSNNPDWDFNPNKDQWPEANQVGAGAFGPGFTPPHGGLLGWSPQAQGILTTVPAAPPPASTNRQSGRQPTPISPPLRDSHPQAMQWNSTTFHQALLDPRVRGLYFPAGGSSSGTVNPVPTTASPISSIFSRTGDPAPNMENTTSGFLGPLLVLQAGFFLLTRILTIPQSLDSWWTSLNFLGGAPTCPGQNSQSPTSNHSPTSCPPICPGYRWMCLRRFIIFLFILLLCLIFLLVLLDYQGMLPVCPLLPGTSTTSTGPCKTCTIPAQGTSMFPSCCCTKPSDGNCTCIPIPSSWAFARFLWEWASVRFSWLSLLVPFVQWFVGLSPTVWLSVIWMMWYWGPSLYNILSPFLPLLPIFFCLWVYI

SEQ ID NO: 221 - protein, 1619 aa, synthetic construct
  REGION 1..1619: note = Recombinant Sequence
MFVFLVLLPLVSSQCVNFTTRTQLPPAYTNSFTRGVYYPDKVFRSSVLHSTQDLFLPFFSNVTWFHAIHVSGTNGTKRFANPVLPFNDGVYFASTEKSNIIRGWIFGTTLDSKTQSLLIVNNATNVVIKVCEFQFCNDPFLGVYYHKNNKSWMESEFRVYSSANNCTFEYVSQPFLMDLEGKQGNFKNLREFVFKNIDGYFKIYSKHTPINLVRGLPQGFSALEPLVDLPIGINITRFQTLHRSYLTPGDSSSGWTAGAAAYYVGYLQPRTFLLKYNENGTITDAVDCALDPLSETKCTLKSFTVEKGIYQTSNFRVQPTESIVRFPNITNLCPFGEVFNATRFASVYAWNRKRISNCVADYSVLYNSASFSTFKCYGVSPTKLNDLCFTNVYADSFVIRGDEVRQIAPGQTGNIADYNYKLPDDFTGCVIAWNSNNLDSKVGGNYNYLYRLFRKSNLKPFERDISTEIYQAGSTPCNGVKGFNCYFPLQSYGFQPTYGVGYQPYRVVVLSFELLHAPATVCGPKKSTNLVKNKCVNFNFNGLTGTGVLTESNKKFLPFQQFGRDIADTTDAVRDPQTLEILDITPCSFGGVSVITPGTNTSNQVAVLYQGVNCTEVPVAIHADQLTPTWRVYSTGSNVFQTRAGCLIGAEHVNNSYECDIPIGAGICASYQTQTNSPGSASSVASQSIIAYTMSLGVENSVAYSNNSIAIPTNFTISVTTEILPVSMTKTSVDCTMYICGDSTECSNLLLQYGSFCTQLNRALTGIAVEQDKNTQEVFAQVKQIYKTPPIKDFGGFNFSQILPDPSKPSKRSPIEDLLFNKVTLADAGFIKQYGDCLGDIAARDLICAQKFNGLTVLPPLLTDEMIAQYTSALLAGTITSGWTFGAGPALQIPFPMQMAYRFNGIGVTQNVLYENQKLIANQFNSAIGKIQDSLSSTPSALGKLQDVVNQNAQALNTLVKQLSSNFGAISSVLNDILSRLDPPEAEVQIDRLITGRLQSLQTYVTQQLIRAAEIRASANLAATKMSECVLGQSKRVDFCGKGYHLMSFPQSAPHGVVFLHVTYVPAQEKNFTTAPAICHDGKAHFPREGVFVSNGTHWFVTQRNFYEPQIITTDNTFVSGNCDVVIGIVNNTVYDPLQPELDSFKEELDKYFKNHTSPDVDLGDISGINASVVNIQKEIDRLNEVAKNLNESLIDLQELGKYGSGSGSGSGSGSGSGSMGGWSSKPRQGMGTNLSVPNPLGFFPDHQLDPAFGANSNNPDWDFNPNKDQWPEANQVGAGAFGPGFTPPHGGLLGWSPQAQGILTTVPAAPPPASTNRQSGRQPTPISPPLRDSHPQAMQWNSTTFHQALLDPRVRGLYFPAGGSSSGTVNPVPTTASPISSIFSRTGDPAPNMENTTSGFLGPLLVLQAGFFLLTRILTIPQSLDSWWTSLNFLGGAPTCPGQNSQSPTSNHSPTSCPPICPGYRWMCLRRFIIFLFILLLCLIFLLVLLDYQGMLPVCPLLPGTSTTSTGPCKTCTIPAQGTSMFPSCCCTKPSDGNCTCIPIPSSWAFARFLWEWASVRFSWLSLLVPFVQWFVGLSPTVWLSVIWMMWYWGPSLYNILSPFLPLLPIFFCLWVYI

SEQ ID NO: 222 - protein, 1622 aa, synthetic construct
  REGION 1..1622: note = Recombinant Sequence
MFVFLVLLPLVSSQCVNFTNRTQLPSAYTNSFTRGVYYPDKVFRSSVLHSTQDLFLPFFSNVTWFHAIHVSGTNGTKRFDNPVLPFNDGVYFASTEKSNIIRGWIFGTTLDSKTQSLLIVNNATNVVIKVCEFQFCNYPFLGVYYHKNNKSWMESEFRVYSSANNCTFEYVSQPFLMDLEGKQGNFKNLSEFVFKNIDGYFKIYSKHTPINLVRDLPQGFSALEPLVDLPIGINITRFQTLLALHRSYLTPGDSSSGWTAGAAAYYVGYLQPRTFLLKYNENGTITDAVDCALDPLSETKCTLKSFTVEKGIYQTSNFRVQPTESIVRFPNITNLCPFGEVFNATRFASVYAWNRKRISNCVADYSVLYNSASFSTFKCYGVSPTKLNDLCFTNVYADSFVIRGDEVRQIAPGQTGTIADYNYKLPDDFTGCVIAWNSNNLDSKVGGNYNYLYRLFRKSNLKPFERDISTEIYQAGSTPCNGVKGFNCYFPLQSYGFQPTYGVGYQPYRVVVLSFELLHAPATVCGPKKSTNLVKNKCVNFNFNGLTGTGVLTESNKKFLPFQQFGRDIADTTDAVRDPQTLEILDITPCSFGGVSVITPGTNTSNQVAVLYQGVNCTEVPVAIHADQLTPTWRVYSTGSNVFQTRAGCLIGAEYVNNSYECDIPIGAGICASYQTQTNSPGSASSVASQSIIAYTMSLGAENSVAYSNNSIAIPTNFTISVTTEILPVSMTKTSVDCTMYICGDSTECSNLLLQYGSFCTQLNRALTGIAVEQDKNTQEVFAQVKQIYKTPPIKDFGGFNFSQILPDPSKPSKRSPIEDLLFNKVTLADAGFIKQYGDCLGDIAARDLICAQKFNGLTVLPPLLTDEMIAQYTSALLAGTITSGWTFGAGPALQIPFPMQMAYRFNGIGVTQNVLYENQKLIANQFNSAIGKIQDSLSSTPSALGKLQDVVNQNAQALNTLVKQLSSNFGAISSVLNDILSRLDPPEAEVQIDRLITGRLQSLQTYVTQQLIRAAEIRASANLAAIKMSECVLGQSKRVDFCGKGYHLMSFPQSAPHGVVFLHVTYVPAQEKNFTTAPAICHDGKAHFPREGVFVSNGTHWFVTQRNFYEPQIITTDNTFVSGNCDVVIGIVNNTVYDPLQPELDSFKEELDKYFKNHTSPDVDLGDISGINASFVNIQKEIDRLNEVAKNLNESLIDLQELGKYGSGSGSGSGSGSGSGSMGGWSSKPRQGMGTNLSVPNPLGFFPDHQLDPAFGANSNNPDWDFNPNKDQWPEANQVGAGAFGPGFTPPHGGLLGWSPQAQGILTTVPAAPPPASTNRQSGRQPTPISPPLRDSHPQAMQWNSTTFHQALLDPRVRGLYFPAGGSSSGTVNPVPTTASPISSIFSRTGDPAPNMENTTSGFLGPLLVLQAGFFLLTRILTIPQSLDSWWTSLNFLGGAPTCPGQNSQSPTSNHSPTSCPPICPGYRWMCLRRFIIFLFILLLCLIFLLVLLDYQGMLPVCPLLPGTSTTSTGPCKTCTIPAQGTSMFPSCCCTKPSDGNCTCIPIPSSWAFARFLWEWASVRFSWLSLLVPFVQWFVGLSPTVWLSVIWMMWYWGPSLYNILSPFLPLLPIFFCLWVYI

SEQ ID NO: 223 - protein, 1622 aa, synthetic construct
  REGION 1..1622: note = Recombinant Sequence
MFVFLVLLPLVSSQCVNLTTRTQLPPAYTNSFTRGVYYPDKVFRSSVLHSTQDLFLPFFSNVTWFHAIHVSGTNGTKRFDNPVLPFNDGVYFASIEKSNIIRGWIFGTTLDSKTQSLLIVNNATNVVIKVCEFQFCNDPFLDVYYHKNNKSWMKSEFRVYSSANNCTFEYVSQPFLMDLEGKQGNFKNLREFVFKNIDGYFKIYSKHTPINLVRDLPQGFSALEPLVDLPIGINITRFQTLLALHRSYLTPGDSSSGWTAGAAAYYVGYLQPRTFLLKYNENGTITDAVDCALDPLSETKCTLKSFTVEKGIYQTSNFRVQPTESIVRFPNITNLCPFGEVFNATRFASVYAWNRKRISNCVADYSVLYNSASFSTFKCYGVSPTKLNDLCFTNVYADSFVIRGDEVRQIAPGQTGKIADYNYKLPDDFTGCVIAWNSNNLDSKVGGNYNYRYRLFRKSNLKPFERDISTEIYQAGSTPCNGVQGFNCYFPLQSYGFQPTNGVGYQPYRVVVLSFELLHAPATVCGPKKSTNLVKNKCVNFNFNGLTGTGVLTESNKKFLPFQQFGRDIADTTDAVRDPQTLEILDITPCSFGGVSVITPGTNTSNQVAVLYQGVNCTEVPVAIHADQLTPTWRVYSTGSNVFQTRAGCLIGAEHVNNSYECDIPIGAGICASYQTQTNSRGSASSVASQSIIAYTMSLGAENSVAYSNNSIAIPTNFTISVTTEILPVSMTKTSVDCTMYICGDSTECSNLLLQYGSFCTQLNRALTGIAVEQDKNTQEVFAQVKQIYKTPPIKDFGGFNFSQILPDPSKPSKRSPIEDLLFNKVTLADAGFIKQYGDCLGDIAARDLICAQKFNGLTVLPPLLTDEMIAQYTSALLAGTITSGWTFGAGPALQIPFPMQMAYRFNGIGVTQNVLYENQKLIANQFNSAIGKIQDSLSSTPSALGKLQDVVNQNAQALNTLVKQLSSNFGAISSVLNDILSRLDPPEAEVQIDRLITGRLQSLQTYVTQQLIRAAEIRASANLAATKMSECVLGQSKRVDFCGKGYHLMSFPQSAPHGVVFLHVTYVPAHEKNFTTAPAICHDGKAHFPREGVFVSNGTHWFVTQRNFYEPQIITTDNTFVSGNCDVVIGIVNNTVYDPLQPELDSFKEELDKYFKNHTSPDVDLGDISGINASVVNIQKEIDRLNEVAKNLNESLIDLQELGKYGSGSGSGSGSGSGSGSMGGWSSKPRQGMGTNLSVPNPLGFFPDHQLDPAFGANSNNPDWDFNPNKDQWPEANQVGAGAFGPGFTPPHGGLLGWSPQAQGILTTVPAAPPPASTNRQSGRQPTPISPPLRDSHPQAMQWNSTTFHQALLDPRVRGLYFPAGGSSSGTVNPVPTTASPISSIFSRTGDPAPNMENTTSGFLGPLLVLQAGFFLLTRILTIPQSLDSWWTSLNFLGGAPTCPGQNSQSPTSNHSPTSCPPICPGYRWMCLRRFIIFLFILLLCLIFLLVLLDYQGMLPVCPLLPGTSTTSTGPCKTCTIPAQGTSMFPSCCCTKPSDGNCTCIPIPSSWAFARFLWEWASVRFSWLSLLVPFVQWFVGLSPTVWLSVIWMMWYWGPSLYNILSPFLPLLPIFFCLWVYI

SEQ ID NO: 224 - protein, 1615 aa, synthetic construct
  REGION 1..1615: note = Recombinant Sequence
MFVFLVLLPLVSSQCVNLTTRTQLPPAYTNSFTRGVYYPDKVFRSSVLHSTQDLFLPFFSNVTWFHAIHVSGTNVIKRFDNPVLPFNDGVYFASTEKSNIIRGWIFGTTLDSKTQSLLIVNNATNVVIKVCEFQFCNDPFLGVYYHKNNKSWMESEFRVYSSANNCTFEYVSQPFLMDLEGKQGNFKNLREFVFKNIDGYFKIYSKHTPINLVRDLPQGFSALEPLVDLPIGINITRFQTLLALHNSSSGWTAGAAAYYVGYLQPRTFLLKYNENGTITDAVDCALDPLSETKCTLKSFTVEKGIYQTSNFRVQPTESIVRFPNITNLCPFGEVFNATRFASVYAWNRKRISNCVADYSVLYNSASFSTFKCYGVSPTKLNDLCFTNVYADSFVIRGDEVRQIAPGQTGKIADYNYKLPDDFTGCVIAWNSNNLDSKVGGNYNYQYRLFRKSNLKPFERDISTEIYQAGSTPCNGVEGFNCYSPLQSYGFQPTNGVGYQPYRVVVLSFELLHAPATVCGPKKSTNLVKNKCVNFNFNGLTGTGVLTESNKKFLPFQQFGRDIADTTDAVRDPQTLEILDITPCSFGGVSVITPGTNTSNQVAVLYQGVNCTEVPVAIHADQLTPTWRVYSTGSNVFQTRAGCLIGAEHVNNSYECDIPIGAGICASYQTQTNSPGSASSVASQSIIAYTMSLGAENSVAYSNNSIAIPTNFTISVTTEILPVSMTKTSVDCTMYICGDSTECSNLLLQYGSFCTQLNRALTGIAVEQDKNTQEVFAQVKQIYKTPPIKDFGGFNFSQILPDPSKPSKRSPIEDLLFNKVTLADAGFIKQYGDCLGDIAARDLICAQKFNGLNVLPPLLTDEMIAQYTSALLAGTITSGWTFGAGPALQIPFPMQMAYRFNGIGVTQNVLYENQKLIANQFNSAIGKIQDSLSSTPSALGKLQDVVNQNAQALNTLVKQLSSNFGAISSVLNDILSRLDPPEAEVQIDRLITGRLQSLQTYVTQQLIRAAEIRASANLAATKMSECVLGQSKRVDFCGKGYHLMSFPQSAPHGVVFLHVTYVPAQEKNFTTAPAICHDGKAHFPREGVFVSNGTHWFVTQRNFYEPQIITTDNTFVSGNCDVVIGIVNNTVYDPLQPELDSFKEELDKYFKNHTSPDVDLGDISGINASVVNIQKEIDRLNEVAKNLNESLIDLQELGKYGSGSGSGSGSGSGSGSMGGWSSKPRQGMGTNLSVPNPLGFFPDHQLDPAFGANSNNPDWDFNPNKDQWPEANQVGAGAFGPGFTPPHGGLLGWSPQAQGILTTVPAAPPPASTNRQSGRQPTPISPPLRDSHPQAMQWNSTTFHQALLDPRVRGLYFPAGGSSSGTVNPVPTTASPISSIFSRTGDPAPNMENTTSGFLGPLLVLQAGFFLLTRILTIPQSLDSWWTSLNFLGGAPTCPGQNSQSPTSNHSPTSCPPICPGYRWMCLRRFIIFLFILLLCLIFLLVLLDYQGMLPVCPLLPGTSTTSTGPCKTCTIPAQGTSMFPSCCCTKPSDGNCTCIPIPSSWAFARFLWEWASVRFSWLSLLVPFVQWFVGLSPTVWLSVIWMMWYWGPSLYNILSPFLPLLPIFFCLWVYI

SEQ ID NO: 225 - protein, 1614 aa, synthetic construct
  REGION 1..1614: note = Recombinant Sequence
MFVFLVLLPLVSSQCVNLTTRTQLPPAYTNSFTRGVYYPDKVFRSSVLHSTQDLFLPFFSNVTWFHAIHVSGTNVIKRFDNPVLPFNDGVYFASTEKSNIIRGWIFGTTLDSKTQSLLIVNNATNVVIKVCEFQFCNDPFLGVYYHKNNKSWMESEFRVYSSANNCTFEYVSQPFLMDLEGKQGNFKNLREFVFKNIDGYFKIYSKHTPINLVRDLPQGFSALEPLVDLPIGINITRFQTLLALHSSSGWTAGAAAYYVGYLQPRTFLLKYNENGTITDAVDCALDPLSETKCTLKSFTVEKGIYQTSNFRVQPTESIVRFPNITNLCPFGEVFNATRFASVYAWNRKRISNCVADYSVLYNSASFSTFKCYGVSPTKLNDLCFTNVYADSFVIRGDEVRQIAPGQTGKIADYNYKLPDDFTGCVIAWNSNNLDSKVGGNYNYQYRLFRKSNLKPFERDISTEIYQAGSTPCNGVEGFNCYSPLQSYGFQPTNGVGYQPYRVVVLSFELLHAPATVCGPKKSTNLVKNKCVNFNFNGLTGTGVLTESNKKFLPFQQFGRDIADTTDAVRDPQTLEILDITPCSFGGVSVITPGTNTSNQVAVLYQGVNCTEVPVAIHADQLTPTWRVYSTGSNVFQTRAGCLIGAEHVNNSYECDIPIGAGICASYQTQTNSPGSASSVASQSIIAYTMSLGAENSVAYSNNSIAIPTNFTISVTTEILPVSMTKTSVDCTMYICGDSTECSNLLLQYGSFCTQLNRALTGIAVEQDKNTQEVFAQVKQIYKTPPIKDFGGFNFSQILPDPSKPSKRSPIEDLLFNKVTLADAGFIKQYGDCLGDIAARDLICAQKFNGLNVLPPLLTDEMIAQYTSALLAGTITSGWTFGAGPALQIPFPMQMAYRFNGIGVTQNVLYENQKLIANQFNSAIGKIQDSLSSTPSALGKLQDVVNQNAQALNTLVKQLSSNFGAISSVLNDILSRLDPPEAEVQIDRLITGRLQSLQTYVTQQLIRAAEIRASANLAATKMSECVLGQSKRVDFCGKGYHLMSFPQSAPHGVVFLHVTYVPAQEKNFTTAPAICHDGKAHFPREGVFVSNGTHWFVTQRNFYEPQIITTDNTFVSGNCDVVIGIVNNTVYDPLQPELDSFKEELDKYFKNHTSPDVDLGDISGINASVVNIQKEIDRLNEVAKNLNESLIDLQELGKYGSGSGSGSGSGSGSGSMGGWSSKPRQGMGTNLSVPNPLGFFPDHQLDPAFGANSNNPDWDFNPNKDQWPEANQVGAGAFGPGFTPPHGGLLGWSPQAQGILTTVPAAPPPASTNRQSGRQPTPISPPLRDSHPQAMQWNSTTFHQALLDPRVRGLYFPAGGSSSGTVNPVPTTASPISSIFSRTGDPAPNMENTTSGFLGPLLVLQAGFFLLTRILTIPQSLDSWWTSLNFLGGAPTCPGQNSQSPTSNHSPTSCPPICPGYRWMCLRRFIIFLFILLLCLIFLLVLLDYQGMLPVCPLLPGTSTTSTGPCKTCTIPAQGTSMFPSCCCTKPSDGNCTCIPIPSSWAFARFLWEWASVRFSWLSLLVPFVQWFVGLSPTVWLSVIWMMWYWGPSLYNILSPFLPLLPIFFCLWVYI

SEQ ID NO: 226 - protein, 1622 aa, synthetic construct
  REGION 1..1622: note = Recombinant Sequence
MFVFLVLLPLVSSQCVNLTTRTQLPPAYTNSFTRGVYYPDKVFRSSVLHSTQDLFLPFFSNVTWFHAIHVSGTNGTKRFDNPVLPFNDGVYFASTEKSNIIRGWIFGTTLDSKTQSLLIVNNATNVVIKVCEFQFCNDPFLGVYYHKNNKSLMESEFRVYSSANNCTFEYVSQPFLMDLEGKQGNFKNLREFVFKNIDGYFKIYSKHTPINLVRDLPQGFSALEPLVDLPIGINITRFQTLLALHRSYLTPGDSSSGWTAGAAAYYVGYLQPRTFLLKYNENGTITDAVDCALDPLSETKCTLKSFTVEKGIYQTSNFRVQPTESIVRFPNITNLCPFGEVFNATRFASVYAWNRKRISNCVADYSVLYNSASFSTFKCYGVSPTKLNDLCFTNVYADSFVIRGDEVRQIAPGQTGKIADYNYKLPDDFTGCVIAWNSNNLDSKVGGNYNYLYRLFRKSNLKPFERDISTEIYQAGSTPCNGVKGFNCYFPLQSYGFQPTNGVGYQPYRVVVLSFELLHAPATVCGPKKSTNLVKNKCVNFNFNGLTGTGVLTESNKKFLPFQQFGRDIADTTDAVRDPQTLEILDITPCSFGGVSVITPGTNTSNQVAVLYQGVNCTEVPVAIHADQLTPTWRVYSTGSNVFQTRAGCLIGAEHVNNSYECDIPIGAGICASYQTQTNSPGSASSVASQSIIAYTMSLGAENSVAYSNNSIAIPTNFTISVTTEILPVSMTKTSVDCTMYICGDSTECSNLLLQYGSFCTQLNRALTVIAVEQDKNTQEVFAQVKQIYKTPPIKDFGGFNFSQILPDPSKPSKRSPIEDLLFNKVTLADAGFIKQYGDCLGDIAARDLICAQKFNGLTVLPPLLTDEMIAQYTSALLAGTITSGWTFGAGPALQIPFPMQMAYRFNGIGVTQNVLYENQKLIANQFNSAIGKIQDSLSSTPSALGKLQDVVNQNAQALNTLVKQLSSNFGAISSVLNDILSRLDPPEAEVQIDRLITGRLQSLQTYVTQQLIRAAEIRASANLAATKMSECVLGQSKRVDFCGKGYHLMSFPQSAPHGVVFLHVTYVPAQEKNFTTAPAICHDGKAHFPREGVFVSNGTHWFVTQRNFYEPQIITTDNTFVSGNCDVVIGIVNNTVYDPLQPELDSFKEELDKYFKNHTSPDVDLGDISGINASVVNIQKEIDRLNEVAKNLNESLIDLQELGKYGSGSGSGSGSGSGSGSMGGWSSKPRQGMGTNLSVPNPLGFFPDHQLDPAFGANSNNPDWDFNPNKDQWPEANQVGAGAFGPGFTPPHGGLLGWSPQAQGILTTVPAAPPPASTNRQSGRQPTPISPPLRDSHPQAMQWNSTTFHQALLDPRVRGLYFPAGGSSSGTVNPVPTTASPISSIFSRTGDPAPNMENTTSGFLGPLLVLQAGFFLLTRILTIPQSLDSWWTSLNFLGGAPTCPGQNSQSPTSNHSPTSCPPICPGYRWMCLRRFIIFLFILLLCLIFLLVLLDYQGMLPVCPLLPGTSTTSTGPCKTCTIPAQGTSMFPSCCCTKPSDGNCTCIPIPSSWAFARFLWEWASVRFSWLSLLVPFVQWFVGLSPTVWLSVIWMMWYWGPSLYNILSPFLPLLPIFFCLWVYI

SEQ ID NO: 227 - protein, 1622 aa, synthetic construct
  REGION 1..1622: note = Recombinant Sequence
MFVFLVLLPLVSSQCVNLTTRTQLPPAYTNSFTRGVYYPDKVFRSSVLHSTQDLFLPFFSNVTWFHAIHVSGTNGTKRFDNPVLPFNDGVYFASTEKSNIIRGWIFGTTLDSKTQSLLIVNNATNVVIKVCEFQFCNDPFLGVYYHKNNKSWMESEFRVYSSANNCTFEYVSQPFLMDLEGKQGNFKNLREFVFKNIDGYFKIYSKHTPINLVRDLPQGFSALEPLVDLPIGINITRFQTLLALHRSYLTPGDSSSGWTAGAAAYYVGYLQPRTFLLKYNENGTITDAVDCALDPLSETKCTLKSFTVEKGIYQTSNFRVQPTESIVRFPNITNLCPFGEVFNATRFASVYAWNRKRISNCVADYSVLYNSASFSTFKCYGVSPTKLNDLCFTNVYADSFVIRGDEVRQIAPGQTGKIADYNYKLPDDFTGCVIAWNSNNLDSKVGGNYNYLYRLFRKSNLKPFERDISTEIYQAGSKPCNGVEGFNCYFPLQSYGFQPTNGVGYQPYRVVVLSFELLHAPATVCGPKKSTNLVKNKCVNFNFNGLTGTGVLTESNKKFLPFQQFGRDIADTTDAVRDPQTLEILDITPCSFGGVSVITPGTNTSNQVAVLYQGVNCTEVPVAIHADQLTPTWRVYSTGSNVFQTRAGCLIGAEHVNNSYECDIPIGAGICASYQTQTNSHGSASSVASQSIIAYTMSLGAENSVAYSNNSIAIPTNFTISVTTEILPVSMAKTSVDCTMYICGDSTECSNLLLQYGSFCTQLNRALTGIAVEQDKNTQEVFAQVKQIYKTPPIKDFGGFNFSQILPDPSKPSKRSPIEDLLFNKVTLADAGFIKQYGDCLGDIAARDLICAQKFNGLTVLPPLLTDEMIAQYTSALLAGTITSGWTFGAGPALQIPFPMQMAYRFNGIGVTQNVLYENQKLIANQFNSAIGKIQDSLSSTPSALGKLQDVVNQNAQALNTLVKQLSSNFGAISSVLNDILSRLDPPEAEVQIDRLITGRLQSLQTYVTQQLIRAAEIRASANLAATKMSECVLGQSKRVDFCGKGYHLMSFPQSAPHGVVFLHVTYVPAQEKNFTTAPAICHDGKAHFPREGVFVSNGTHWFVTQRNFYEPQIITTDNTFVSGNCDVVIGIVNNTVYDPLQPELDSFKEELDKYFKNHTSPDVDLGDISGINASVVNIQKEIDRLNEVAKNLNESLIDLQELGKYGSGSGSGSGSGSGSGSMGGWSSKPRQGMGTNLSVPNPLGFFPDHQLDPAFGANSNNPDWDFNPNKDQWPEANQVGAGAFGPGFTPPHGGLLGWSPQAQGILTTVPAAPPPASTNRQSGRQPTPISPPLRDSHPQAMQWNSTTFHQALLDPRVRGLYFPAGGSSSGTVNPVPTTASPISSIFSRTGDPAPNMENTTSGFLGPLLVLQAGFFLLTRILTIPQSLDSWWTSLNFLGGAPTCPGQNSQSPTSNHSPTSCPPICPGYRWMCLRRFIIFLFILLLCLIFLLVLLDYQGMLPVCPLLPGTSTTSTGPCKTCTIPAQGTSMFPSCCCTKPSDGNCTCIPIPSSWAFARFLWEWASVRFSWLSLLVPFVQWFVGLSPTVWLSVIWMMWYWGPSLYNILSPFLPLLPIFFCLWVYI

SEQ ID NO: 228 - protein, 1619 aa, synthetic construct
  REGION 1..1619: note = Recombinant Sequence
MFVFLVLLPLVSSQCVNLTTRTQLPPAYTNSFTRGVYYPDKVFRSSVLHSTRDLFLPFFSNVTWFHVISGTNGTKRFDNPVLPFNDGVYFASTEKSNIIRGWIFGTTLDSKTQSLLIVNNATNVVIKVCEFQFCNDPFLGVYHKNNKSWMESEFRVYSSANNCTFEYVSQPFLMDLEGKQGNFKNLREFVFKNIDGYFKIYSKHTPINLVRDLPQGFSALEPLVDLPIGINITRFQTLLALHRSYLTPGDSSSGWTAGAAAYYVGYLQPRTFLLKYNENGTITDAVDCALDPLSETKCTLKSFTVEKGIYQTSNFRVQPTESIVRFPNITNLCPFGEVFNATRFASVYAWNRKRISNCVADYSVLYNSASFSTFKCYGVSPTKLNDLCFTNVYADSFVIRGDEVRQIAPGQTGKIADYNYKLPDDFTGCVIAWNSNNLDSKVGGNYNYLYRLFRKSNLKPFERDISTEIYQAGSTPCNGVKGFNCYFPLQSYGFQPTNGVGYQPYRVVVLSFELLHAPATVCGPKKSTNLVKNKCVNFNFNGLTGTGVLTESNKKFLPFQQFGRDIADTTDAVRDPQTLEILDITPCSFGGVSVITPGTNTSNQVAVLYQGVNCTEVPVAIHADQLTPTWRVYSTGSNVFQTRAGCLIGAEHVNNSYECDIPIGAGICASYQTHTNSPGSASSVASQSIIAYTMSLGAENSVAYSNNSIAIPTNFTISVTTEILPVSMTKTSVDCTMYICGDSTECSNLLLQYGSFCTQLNRALTGIAVEQDKNTQEVFAQVKQIYKTPPIKDFGGFNFSQILPDPSKPSKRSPIEDLLFNKVTLADAGFIKQYGDCLGDIAARDLICAQKFNGLTVLPPLLTDEMIAQYTSALLAGTITSGWTLGAGPALQIPFPMQMAYRFNGIGVTQNVLYENQKLIANQFNSAIGKIQDSLSSTPSALGKLQDVVNQNAQALNTLVKQLSSNFGAISSVLNDILSRLDPPEAEVQIDRLITGRLQSLQTYVTQQLIRAAEIRASANLAATKMSECVLGQSKRVDFCGKGYHLMSFPQSAPHGVVFLHVTYVPAQEKNFTTAPAICHDGKAHFPREGVFVSNGTHWFVTQRNFYEPQIITTDNTFVSGNCDVVIGIVNNTVYDPLQPELDSFKEELDKYFKNHTSPDVDLGDISGINASVVNIQKEIDRLNEVAKNLNESLIDLQELGKYGSGSGSGSGSGSGSGSMGGWSSKPRQGMGTNLSVPNPLGFFPDHQLDPAFGANSNNPDWDFNPNKDQWPEANQVGAGAFGPGFTPPHGGLLGWSPQAQGILTTVPAAPPPASTNRQSGRQPTPISPPLRDSHPQAMQWNSTTFHQALLDPRVRGLYFPAGGSSSGTVNPVPTTASPISSIFSRTGDPAPNMENTTSGFLGPLLVLQAGFFLLTRILTIPQSLDSWWTSLNFLGGAPTCPGQNSQSPTSNHSPTSCPPICPGYRWMCLRRFIIFLFILLLCLIFLLVLLDYQGMLPVCPLLPGTSTTSTGPCKTCTIPAQGTSMFPSCCCTKPSDGNCTCIPIPSSWAFARFLWEWASVRFSWLSLLVPFVQWFVGLSPTVWLSVIWMMWYWGPSLYNILSPFLPLLPIFFCLWVYI

SEQ ID NO: 229 - protein, 1622 aa, synthetic construct
  REGION 1..1622: note = Recombinant Sequence
MFVFFVLLPLVSSQCVNLTTRTQLPPAYTNSFTRGVYYPDKVFRSSVLHSTQDLFLPFFSNVTWFHAIHVSGTNGTKRFDNPVLPFNDGVYFASIEKSNIIRGWIFGTTLDSKTQSLLIVNNATNVVIKVCEFQFCNDPFLGVYYHKNNKSWMESEFRVYSSANNCTFEYVSQPFLMDLEGKQGNFKNLREFVFKNIDGYFKIYSKHTPINLVRDLPQGFSALEPLVDLPIGINITRFQTLLALHRSYLTPGGSSSGWTAGAAAYYVGYLQPRTFLLKYNENGTITDAVDCALDPLSETKCTLKSFTVEKGIYQTSNFRVQPTESIVRFPNITNLCPFGEVFNATRFASVYAWNRKRISNCVADYSVLYNSASFSTFKCYGVSPTKLNDLCFTNVYADSFVIRGDEVRQIAPGQTGKIADYNYKLPDDFTGCVIAWNSNNLDSKVGGNYNYLYRLFRKSNLKPFERDISTEIYQAGSTPCNGVKGFNCYFPLQSYGFQPTNGVGYQPYRVVVLSFELLHAPATVCGPKKSTNLVKNKCVNFNFNGLTGTGVLTESNKKFLPFQQFGRDIADTTDAVRDPQTLEILDITPCSFGGVSVITPGTNTSNQVAVLYQGVNCTEVPVAIHADQLTPTWRVYSTGSNVFQTRAGCLIGAEHVNNSYECDIPIGAGICASYQTQTNSPGSASSVASQSIIAYTMSLGVENSVAYSNNSIAIPTNFTISVTTEILPVSMTKTSVDCTMYICGDSTECSNLLLQYGSFCTQLNRALTGIAVEQDKNTQEVFAQVKQIYKTPPIKDFGGFNFSQILPDPSKPSKRSPIEDLLFNKVTLADAGFIKQYGDCLGDIAARDLICAQKFNGLTVLPPLLTDEMIAQYTSALLAGTITSGWTFGAGPALQIPFPMQMAYRFNGIGVTQNVLYENQKLIANQFNSAIGKIQDSLSSTPSALGKLQDVVNQNAQALNTLVKQLSSNFGAISSVLNDILSRLDPPEAEVQIDRLITGRLQSLQTYVTQQLIRAAEIRASANLAATKMSECVLGQSKRVDFCGKGYHLMSFPQSAPHGVVFLHVTYVPAQEKNFTTAPAICHDGKAHFPREGVFVSNGTHWFVTQRNFYEPQIITTDNTFVSGNCDVVIGIVNNTVYDPLQPELDSFKEELDKYFKNHTSPDVDLGDISGINASVVNIQKEIDRLNEVAKNLNESLIDLQELGKYGSGSGSGSGSGSGSGSMGGWSSKPRQGMGTNLSVPNPLGFFPDHQLDPAFGANSNNPDWDFNPNKDQWPEANQVGAGAFGPGFTPPHGGLLGWSPQAQGILTTVPAAPPPASTNRQSGRQPTPISPPLRDSHPQAMQWNSTTFHQALLDPRVRGLYFPAGGSSSGTVNPVPTTASPISSIFSRTGDPAPNMENTTSGFLGPLLVLQAGFFLLTRILTIPQSLDSWWTSLNFLGGAPTCPGQNSQSPTSNHSPTSCPPICPGYRWMCLRRFIIFLFILLLCLIFLLVLLDYQGMLPVCPLLPGTSTTSTGPCKTCTIPAQGTSMFPSCCCTKPSDGNCTCIPIPSSWAFARFLWEWASVRFSWLSLLVPFVQWFVGLSPTVWLSVIWMMWYWGPSLYNILSPFLPLLPIFFCLWVYI

SEQ ID NO: 230 - protein, 1622 aa, synthetic construct
  REGION 1..1622: note = Recombinant Sequence
MFVFLVLLPLVSIQCVNLTTRTQLPPAYTNSFTRGVYYPDKVFRSSVLHSTQDLFLPFFSNVTWFHAIHVSGTNGTKRFDNPVLPFNDGVYFASTEKSNIIRGWIFGTTLDSKTQSLLIVNNATNVVIKVCEFQFCNDPFLGVYYHKNNKSCMESEFRVYSSANNCTFEYVSQPFLMDLEGKQGNFKNLREFVFKNIDGYFKIYSKHTPINLVRDLPQGFSALEPLVDLPIGINITRFQTLLALHRSYLTPGDSSSGWTAGAAAYYVGYLQPRTFLLKYNENGTITDAVDCALDPLSETKCTLKSFTVEKGIYQTSNFRVQPTESIVRFPNITNLCPFGEVFNATRFASVYAWNRKRISNCVADYSVLYNSASFSTFKCYGVSPTKLNDLCFTNVYADSFVIRGDEVRQIAPGQTGKIADYNYKLPDDFTGCVIAWNSNNLDSKVGGNYNYRYRLFRKSNLKPFERDISTEIYQAGSTPCNGVEGFNCYFPLQSYGFQPTNGVGYQPYRVVVLSFELLHAPATVCGPKKSTNLVKNKCVNFNFNGLTGTGVLTESNKKFLPFQQFGRDIADTTDAVRDPQTLEILDITPCSFGGVSVITPGTNTSNQVAVLYQGVNCTEVPVAIHADQLTPTWRVYSTGSNVFQTRAGCLIGAEHVNNSYECDIPIGAGICASYQTQTNSPGSASSVASQSIIAYTMSLGAENSVAYSNNSIAIPTNFTISVTTEILPVSMTKTSVDCTMYICGDSTECSNLLLQYGSFCTQLNRALTGIAVEQDKNTQEVFAQVKQIYKTPPIKDFGGFNFSQILPDPSKPSKRSPIEDLLFNKVTLADAGFIKQYGDCLGDIAARDLICAQKFNGLTVLPPLLTDEMIAQYTSALLAGTITSGWTFGAGPALQIPFPMQMAYRFNGIGVTQNVLYENQKLIANQFNSAIGKIQDSLSSTPSALGKLQDVVNQNAQALNTLVKQLSSNFGAISSVLNDILSRLDPPEAEVQIDRLITGRLQSLQTYVTQQLIRAAEIRASANLAATKMSECVLGQSKRVDFCGKGYHLMSFPQSAPHGVVFLHVTYVPAQEKNFTTAPAICHDGKAHFPREGVFVSNGTHWFVTQRNFYEPQIITTDNTFVSGNCDVVIGIVNNTVYDPLQPELDSFKEELDKYFKNHTSPDVDLGDISGINASVVNIQKEIDRLNEVAKNLNESLIDLQELGKYGSGSGSGSGSGSGSGSMGGWSSKPRQGMGTNLSVPNPLGFFPDHQLDPAFGANSNNPDWDFNPNKDQWPEANQVGAGAFGPGFTPPHGGLLGWSPQAQGILTTVPAAPPPASTNRQSGRQPTPISPPLRDSHPQAMQWNSTTFHQALLDPRVRGLYFPAGGSSSGTVNPVPTTASPISSIFSRTGDPAPNMENTTSGFLGPLLVLQAGFFLLTRILTIPQSLDSWWTSLNFLGGAPTCPGQNSQSPTSNHSPTSCPPICPGYRWMCLRRFIIFLFILLLCLIFLLVLLDYQGMLPVCPLLPGTSTTSTGPCKTCTIPAQGTSMFPSCCCTKPSDGNCTCIPIPSSWAFARFLWEWASVRFSWLSLLVPFVQWFVGLSPTVWLSVIWMMWYWGPSLYNILSPFLPLLPIFFCLWVYI

SEQ ID NO: 231 - protein, 1621 aa, synthetic construct
  REGION 1..1621: note = Recombinant Sequence
MFVFLVLLPLVSSQCVNLTTRTQLPPAYTNSFTRGVYYPDKVFRSSVLHSTQDLFLPFFSNVTWFHAIHVSGTNGTKRFGNPVLPFNDGVYFASTEKSNIIRGWIFGTTLDSKTQSLLIVNNATNVVIKVCEFQFCNDPFLGVYHKNNKSWMESESRVYSSANNCTFEYVSQPFLMDLEGKQGNFKNLREFVFKNIDGYFKIYSKHTPINLVRDLPQGFSALEPLVDLPIGINITRFQTLLALHRSYLTPGDSSSGWTAGAAAYYVGYLQPRTFLLKYNENGTITDAVDCALDPLSETKCTLKSFTVEKGIYQTSNFRVQPTESIVRFPNITNLCPFGEVFNATRFASVYAWNRKRISNCVADYSVLYNSASFSTFKCYGVSPTKLNDLCFTNVYADSFVIRGDEVRQIAPGQTGKIADYNYKLPDDFTGCVIAWNSNNLDSKVGGNYNYRYRLFRKSNLKPFERDISTEIYQAGSTPCNGVEGFNCYFPLQSYGFQPTNGVGYQPYRVVVLSFELLHAPATVCGPKKSTNLVKNKCVNFNFNGLTGTGVLTESNKKFLPFQQFGRDIADTTDAVRDPQTLEILDITPCSFGGVSVITPGTNTSNQVAVLYQGVNCTEVPVAIHADQLTPTWRVYSTGSNVFQTRAGCLIGAEHVNNSYECDIPIGAGICASYQTQTNSPGSASSVASQSIIAYTMSLGAENSVAYSNNSIAIPTNFTISVTTEILPVSMTKTSVDCTMYICGDSTECSNLLLQYGSFCTQLNRALTGIAVEQDKNTQEVFAQVKQIYKTPPIKDFGGFNFSQILPDPSKPSKRSPIEDLLFNKVTLADAGFIKQYGDCLGDIAARDLICAQKFNGLNVLPPLLTDEMIAQYTSALLAGTITSGWTFGAGPALQIPFPMQMAYRFNGIGVTQNVLYENQKLIANQFNSAIGKIQDSLSSTPSALGKLQHVVNQNAQALNTLVKQLSSNFGAISSVLNDILSRLDPPEAEVQIDRLITGRLQSLQTYVTQQLIRAAEIRASANLAATKMSECVLGQSKRVDFCGKGYHLMSFPQSAPHGVVFLHVTYVPAQEKNFTTAPAICHDGKAHFPREGVFVSNGTHWFVTQRNFYEPQIITTDNTFVSGNCDVVIGIVNNTVYDPLQPELDSFKEELDKYFKNHTSPDVDLGDISGINASVVNIQKEIDRLNEVAKNLNESLIDLQELGKYGSGSGSGSGSGSGSGSMGGWSSKPRQGMGTNLSVPNPLGFFPDHQLDPAFGANSNNPDWDFNPNKDQWPEANQVGAGAFGPGFTPPHGGLLGWSPQAQGILTTVPAAPPPASTNRQSGRQPTPISPPLRDSHPQAMQWNSTTFHQALLDPRVRGLYFPAGGSSSGTVNPVPTTASPISSIFSRTGDPAPNMENTTSGFLGPLLVLQAGFFLLTRILTIPQSLDSWWTSLNFLGGAPTCPGQNSQSPTSNHSPTSCPPICPGYRWMCLRRFIIFLFILLLCLIFLLVLLDYQGMLPVCPLLPGTSTTSTGPCKTCTIPAQGTSMFPSCCCTKPSDGNCTCIPIPSSWAFARFLWEWASVRFSWLSLLVPFVQWFVGLSPTVWLSVIWMMWYWGPSLYNILSPFLPLLPIFFCLWVYI

SEQ ID NO: 232 - protein, 1622 aa, synthetic construct
  REGION 1..1622: note = Recombinant Sequence
MFVFLVLLPLVSSQCVNLTTRTQLPPAYTNSFTRGVYYPDKVFRSSVLHSTQDLFLPFFSNVTWFHAIHVSGTNGTKRFDNPVLPFNDGVYFASTEKSNIIRGWIFGTTLDSKTQSLLIVNNATNVVIKVCEFQFCNDPFLGVYYHKNNKSWMESEFRVYSSANNCTFEYVSQPFLMDLEGKQGNFKNLREFVFKNIDGYFKIYSKHTPINLVRDLPQGFSALEPLVDLPIGINITRFQTLLALHRSYLTPGDSSSGWTAGAAAYYVGYLQPRTFLLKYNENGTITDAVDCALDPLSETKCTLKSFTVEKGIYQTSNFRVQPTESIVRFPNITNLCPFGEVFNATRFASVYAWNRKRISNCVADYSVLYNSASFSTFKCYGVSPTKLNDLCFTNVYADSFVIRGDEVRQIAPGQTGKIADYNYKLPDDFTGCVIAWNSNNLDSKVGGNYNYLYRLFRKSNLKPFERDISTEIYQAGSTPCNGVKGFNCYFPLQSYGFQPTNGVGYQPYRVVVLSFELLHAPATVCGPKKSTNLVKNKCVNFNFNGLTGTGVLTESNKKFLPFQQFGRDIADTTDAVRDPQTLEILDITPCSFGGVSVITPGTNTSNQVAVLYQGVNCTEVPVAIHADQLTPTWRVYSTGSNVFQTRAGCLIGAEHVNNSYECDIPIGAGICASYQTQTNSPGSASSVASQSIIAYTMSLGAENSVAYSNNSIAIPTNFTISVTTEILPVSMTKTSVDCTMYICGDSTECSNLLLQYGSFCTQLNRALTGIAVEQDKNTQEVFAQVKQIYKTPPIKDFGGFNFSQILPDPSKPSKRSPIEDLLFNKVTLADAGFIKQYGDCLGDIAARDLICAQKFNGLTVLPPLLTDEMIAQYTSALLAGTITSGWTFGAGPALQIPFPMQMAYRFNGIGVTQNVLYENQKLIANQFNSAIGKIQDSLSSTPSALGKLQDVVNQNAQALNTLVKQLSSNFGAISSVLNDILSRLDPPEAEVQIDRLITGRLQSLQTYVTQQLIRAAEIRASANLAATKMSECVLGQSKRVDFCGKGYHLMSFPQSAPHGVVFLHVTYVPAQEKNFTTAPAICHDGKAHFPREGVFVSNGTHWFVTQRNFYEPQIITTDNTFVSGNCDVVIGIVNNTVYDPLQPELDSFKEELDKYFKNHTSPDVDLGDISGINASFVNIQKEIDRLNEVAKNLNESLIDLQELGKYGSGSGSGSGSGSGSGSMGGWSSKPRQGMGTNLSVPNPLGFFPDHQLDPAFGANSNNPDWDFNPNKDQWPEANQVGAGAFGPGFTPPHGGLLGWSPQAQGILTTVPAAPPPASTNRQSGRQPTPISPPLRDSHPQAMQWNSTTFHQALLDPRVRGLYFPAGGSSSGTVNPVPTTASPISSIFSRTGDPAPNMENTTSGFLGPLLVLQAGFFLLTRILTIPQSLDSWWTSLNFLGGAPTCPGQNSQSPTSNHSPTSCPPICPGYRWMCLRRFIIFLFILLLCLIFLLVLLDYQGMLPVCPLLPGTSTTSTGPCKTCTIPAQGTSMFPSCCCTKPSDGNCTCIPIPSSWAFARFLWEWASVRFSWLSLLVPFVQWFVGLSPTVWLSVIWMMWYWGPSLYNILSPFLPLLPIFFCLWVYI

SEQ ID NO: 233 - protein, 1622 aa, synthetic construct
  REGION 1..1622: note = Recombinant Sequence
MFVFLVLLPLVSSQCVNLTTRTQLPPAYTNSFTRGVYYPDKVFRSSVLHSTQDLFLPFFSNVTWFHAIHVSGTNGTKRFDNPVLPFNDGVYFASTEKSNIIRGWIFGTTLDSKTQSLLIVNNATNVVIKVCEFQFCNDPFLGVYYHKNNKSWMESELRVYSSANNCTFEYVSQPFLMDLEGKQGNFKNLREFVFKNIDGYFKIYSKHTPINLVRDLPQGFSALEPLVDLPIGINITRFQTLLALHRSYLTPGDSSSGWTAGAAAYYVGYLQPRTFLLKYNENGTITDAVDCALDPLSETKCTLKSFTVEKGIYQTSNFRVQPTESIVRFPNITNLCPFGEVFNATRFASVYAWNRKRISNCVADYSFLYNSASFSTFKCYGVSPTKLNDLCFTNVYADSFVIRGDEVRQIAPGQTGKIADYNYKLPDDFTGCVIAWNSNNLDSKVGGNYNYLYRLFRKSNLKPFERDISTEIYQAGSTPCNGVEGFNCYFPLQSYGFQPTNGVGYQPYRVVVLSFELLHAPATVCGPKKSTNLVKNKCVNFNFNGLTGTGVLTESNKKFLPFQQFGRDIADTTDAVRDPQTLEILDITPCSFGGVSVITPGTNTSNQVAVLYHGVNCTEVPVAIHADQLTPTWRVYSTGSNVFQTRAGCLIGAEHVNNSYECDIPIGAGICASYQTQTNSRGSASSVASQSIIAYTMSLGAENSVAYSNNSIAIPTNFTISVTTEILPVSMTKTSVDCTMYICGDSTECSNLLLQYGSFCTQLNRALTGIAVEQDKNTQEVFAQVKQIYKTPPIKDFGGFNFSQILPDPSKPSKRSPIEDLLFNKVTLADAGFIKQYGDCLGDIAARDLICAQKFNGLTVLPPLLTDEMIAQYTSALLAGTITSGWTFGAGPALQIPFPMQMAYRFNGIGVTQNVLYENQKLIANQFNSAIGKIQDSLSSTPSALGKLQDVVNQNAQALNTLVKQLSSNFGAISSVLNDILSRLDPPEAEVQIDRLITGRLQSLQTYVTQQLIRAAEIRASANLAATKMSECVLGQSKRVDFCGKGYHLMSFPQSAPHGVVFLHVTYVPAQEKNFTTAPAICHDGKAHFPREGVFVSNGTHWFVTQRNFYEPQIITTDNTFVSGNCDVVIGIVNNTVYDPLQPELDSFKEELDKYFKNHTSPDVDLGDISGINASVVNIQKEIDRLNEVAKNLNESLIDLQELGKYGSGSGSGSGSGSGSGSMGGWSSKPRQGMGTNLSVPNPLGFFPDHQLDPAFGANSNNPDWDFNPNKDQWPEANQVGAGAFGPGFTPPHGGLLGWSPQAQGILTTVPAAPPPASTNRQSGRQPTPISPPLRDSHPQAMQWNSTTFHQALLDPRVRGLYFPAGGSSSGTVNPVPTTASPISSIFSRTGDPAPNMENTTSGFLGPLLVLQAGFFLLTRILTIPQSLDSWWTSLNFLGGAPTCPGQNSQSPTSNHSPTSCPPICPGYRWMCLRRFIIFLFILLLCLIFLLVLLDYQGMLPVCPLLPGTSTTSTGPCKTCTIPAQGTSMFPSCCCTKPSDGNCTCIPIPSSWAFARFLWEWASVRFSWLSLLVPFVQWFVGLSPTVWLSVIWMMWYWGPSLYNILSPFLPLLPIFFCLWVYI

SEQ ID NO: 234 - protein, 1622 aa, synthetic construct
  REGION 1..1622: note = Recombinant Sequence
MFVFFVLLPLVSSQCVNLTTRTQLPPAYTNSFTRGVYYPDKVFRSSVLHSTQDLFLPFFSNVTWFHAIHVSGTNGTKRFDNPVLPFNDGVYFASIEKSNIIRGWIFGTTLDSKTQSLLIVNNATNVVIKVCEFQFCNDPFLGVYYHKNNKSWMESEFRVYSSANNCTFEYVSQPFLMDLEGKQGNFKNLREFVFKNIDGYFKIYSKHTPINLVRDLPQGFSALEPLVDLPIGINITRFQTLLALHRSYLTPGGSSSGWTAGAAAYYVGYLQPRTFLLKYNENGTITDAVDCALDPLSETKCTLKSFTVEKGIYQTSNFRVQPTESIVRFPNITNLCPFGEVFNATRFASVYAWNRKRISNCVADYSVLYNSASFSTFKCYGVSPTKLNDLCFTNVYADSFVIRGDEVRQIAPGQTGKIADYNYKLPDDFTGCVIAWNSNNLDSKVGGNYNYLYRLFRKSNLKPFERDISTEIYQAGNTPCNGVEGFNCYFPLQSYGFQPTNGVGYQPYRVVVLSFELLHAPATVCGPKKSTNLVKNKCVNFNFNGLTGTGVLTESNKKFLPFQQFGRDIADTTDAVRDPQTLEILDITPCSFGGVSVITPGTNTSNQVAVLYQGVNCTEVPVAIHADQLTPTWRVYSTGSNVFQTRAGCLIGAEHVNNSYECDIPIGAGICASYQTQTNSPGSASSVASQSIIAYTMSLGAENSVAYSNNSIAIPTNFTISVTTEILPVSMTKTSVDCTMYICGDSTECSNLLLQYGSFCTQLNRALTGIAVEQDKNTQEVFAQVKQIYKTPPIKDFGGFNFSQILPDPSKPSKRSPIEDLLFNKVTLADAGFIKQYGDCLGDIAARDLICAQKFNGLTVLPPLLTDEMIAQYTSALLAGTITSGWTFGAGPALQIPFPMQMAYRFNGIGVTQNVLYENQKLIANQFNSAIGKIQDSLSSTPSALGKLQDVVNQNARALNTLVKQLSSNFGAISSVLNDILSRLDPPEAEVQIDRLITGRLQSLQTYVTQQLIRAAEIRASANLAATKMSECVLGQSKRVDFCGKGYHLMSFPQSAPHGVVFLHVTYVPAQEKNFTTAPAICHDGKAHFPREGVFVSNGTHWFVTQRNFYEPQIITTDNTFVSGNCDVVIGIVNNTVYDPLQPELDSFKEELDKYFKNHTSPDVDLGDISGINASVVNIQKEIDRLNEVAKNLNESLIDLQELGKYGSGSGSGSGSGSGSGSMGGWSSKPRQGMGTNLSVPNPLGFFPDHQLDPAFGANSNNPDWDFNPNKDQWPEANQVGAGAFGPGFTPPHGGLLGWSPQAQGILTTVPAAPPPASTNRQSGRQPTPISPPLRDSHPQAMQWNSTTFHQALLDPRVRGLYFPAGGSSSGTVNPVPTTASPISSIFSRTGDPAPNMENTTSGFLGPLLVLQAGFFLLTRILTIPQSLDSWWTSLNFLGGAPTCPGQNSQSPTSNHSPTSCPPICPGYRWMCLRRFIIFLFILLLCLIFLLVLLDYQGMLPVCPLLPGTSTTSTGPCKTCTIPAQGTSMFPSCCCTKPSDGNCTCIPIPSSWAFARFLWEWASVRFSWLSLLVPFVQWFVGLSPTVWLSVIWMMWYWGPSLYNILSPFLPLLPIFFCLWVYI

SEQ ID NO: 235 - protein, 1617 aa, synthetic construct
  REGION 1..1617: note = Recombinant Sequence
MFVFLVLLPLVSSQCVNLTTRTQLPPAYTNSFTRGVYYPDKVFRSSVLHSTQDLFLPFFSNVTWFHAIHVSGTNGTKRFDNPVLPFNDGVYFASTEKSNIIRGWIFGTTLDSKTQSLLIVNNATNVVIKVCEFQFCNDPFYYHKNNKSWMESEFRVYSSANNCTFEYVSQPFLMDLEGKQGNFKNLREFVFKNIDGYFKIYSKHTPINLVRDLPQGFSALEPLVDLPIGINITRFQTLLHRSYLTPGDSSSGWTAGAAACYVGYLQPRTFLLKYNENGTITDAVDCALDPLSETKCTLKSFTVEKGIYQTSNFRVQPTESIVRFPNITNLCPFGEVFNATRFASVYAWNRKRISNCVADYSVLYNSASFSTFKCYGVSPTKLNDLCFTNVYADSFVIRGDEVRQIAPGQTGKIADYNYKLPDDFTGCVIAWNSNNLDSKVGGNYNYLYRLFRKSNLKPFERDISTEIYQAGSTPCNGVKGFNCYFPLQSYGFQPTYGVGYQPYRVVVLSFELLHAPATVCGPKKSTNLVKNKCVNFNFNGLTGTGVLTESNKKFLPFQQFGRDIADTTDAVRDPQTLEILDITPCSFGGVSVITPGTNTSNQVAVLYQGVNCTEVPVAIHADQLTPTWRVYSTGSNVFQTRAGCLIGAEHVNNSYECDIPIGAGICASYQTQTNSHGSASSVASQSIIAYTMSLGAENSVAYSNNSIAIPTNFTISVTTEILPVSMTKTSVDCTMYICGDSTECSNLLLQYGSFCTQLNRALTGIAVEQDKNTQEVFAQVKQIYKTPPIKDFGGFNFSQILPDPSKPSKRSPIEDLLFNKVTLADAGFIKQYGDCLGDIAARDLICAQKFNGLTVLPPLLTDEMIAQYTSALLAGTITSGWTFGAGPALQIPFPMQMAYRFNGIGVTQNVLYENQKLIANQFNSAIGKIQDSLSSTPSALGKLQDVVNQNAQALNTLVKQLSSNFGAISSVLNDILSRLDPPEAEVQIDRLITGRLQSLQTYVTQQLIRAAEIRASANLAATKMSECVLGQSKRVDFCGKGYHLMSFPQSAPHGVVFLHVTYVPAQEKNFTTAPAICHDGKAHFPRKGVFVSNGTYWFVTQRNFYEPQIITTDNTFVSGNCDVVIGIVNNTVYDPLQPELDSFKEELDKYFKNHTSPDVDLGDISGINASFVNIQKEIDRLNEVAKNLNESLIDLQELGKYGSGSGSGSGSGSGSGSMGGWSSKPRQGMGTNLSVPNPLGFFPDHQLDPAFGANSNNPDWDFNPNKDQWPEANQVGAGAFGPGFTPPHGGLLGWSPQAQGILTTVPAAPPPASTNRQSGRQPTPISPPLRDSHPQAMQWNSTTFHQALLDPRVRGLYFPAGGSSSGTVNPVPTTASPISSIFSRTGDPAPNMENTTSGFLGPLLVLQAGFFLLTRILTIPQSLDSWWTSLNFLGGAPTCPGQNSQSPTSNHSPTSCPPICPGYRWMCLRRFIIFLFILLLCLIFLLVLLDYQGMLPVCPLLPGTSTTSTGPCKTCTIPAQGTSMFPSCCCTKPSDGNCTCIPIPSSWAFARFLWEWASVRFSWLSLLVPFVQWFVGLSPTVWLSVIWMMWYWGPSLYNILSPFLPLLPIFFCLWVYI

SEQ ID NO: 236 - protein, 1622 aa, synthetic construct
  REGION 1..1622: note = Recombinant Sequence
MFVFLVLLPLVSSQCVNFTTRTQLPPAYTNSFTRGVYYPDKVFRSSVLHSTQDLFLPFFSNVTWFHAIHVSGTNGTKRFDNPVLPFNDGVYFASTEKSNIIRGWIFGTTLDSKTQSLLIVNNATNVVIKVCEFQFCNDPFLGVYYHKNNKSWMESEFRVYSSANNCTFEYVSQPFLMDLEGKQGNFKNLREFVFKNIDGYFKIYSKHTPINLVRDLPQGFSALEPLVDLPIGINITRFQTLLALHRSYLTPGDSSSGWTAGAAAYYVGYLQPRTFLLKYNENGTITDAVDCALDPLSETKCTLKSFTVEKGIYQTSNFRVQPTESIVRFPNITNLCPFGEVFNATRFASVYAWNRKRISNCVADYSVLYNSASFSTFKCYGVSPTKLNDLCFTNVYADSFVIRGDEVRQIAPGQTGKIADYNYKLPDDFTGCVIAWNSNNLDSKVGGNYNYRYRLFRKSNLKPFERDISTEIYQAGSTPCNGVEGFNCYFPLQSYGFQPTYGVGYQPYRVVVLSFELLHAPATVCGPKKSTNLVKNKCVNFNFNGLTGTGVLTESNKKFLPFQQFGRDIADTTDAVRDPQTLEILDITPCSFGGVSVITPGTNTSNQVAVLYQGVNCTEVPVAIHADQLTPTWRVYSTGSNVFQTRAGCLIGVEYVNNSYECDIPIGAGICASYQTQTNSPGSASSVASQSIIAYTMSLGAENSVAYSNNSIAIPTNFTISVTTEILPVSMTKTSVDCTMYICGDSTECSNLLLQYGSFCTQLNRALTGIAVEQDKNTQEVFAQVKQIYKTPPIKYFGGFNFSQILPDPSKPSKRSPIEDLLFNKVTLADAGFIKQYGDCLGDIAARDLICAQKFNGLTVLPPLLTDEMIAQYTSALLAGTITSGWTFGAGPALQIPFPMQMAYRFNGIGVTQNVLYENQKLIANQFNSAIGKIQDSLSSTPSALGKLQDVVNQNAQALNTLVKQLSSNFGAISSVLNDILSRLDPPEAEVQIDRLITGRLQSLQTYVTQQLIRAAEIRASANLAATKMSECVLGQSKRVDFCGKGYHLMSFPQSAPHGVVFLHVTYVPAQEKNFTTAPAICHDGKAHFPREGVFVSNGTHWFVTQRNFYEPQIITTDNTFVSGNCDVVIGIVNNTVYDPLQPELDSFKEELDKYFKNHTSPDVDLGDISGINASVVNIQKEIDRLNEVAKNLNESLIDLQELGKYGSGSGSGSGSGSGSGSMGGWSSKPRQGMGTNLSVPNPLGFFPDHQLDPAFGANSNNPDWDFNPNKDQWPEANQVGAGAFGPGFTPPHGGLLGWSPQAQGILTTVPAAPPPASTNRQSGRQPTPISPPLRDSHPQAMQWNSTTFHQALLDPRVRGLYFPAGGSSSGTVNPVPTTASPISSIFSRTGDPAPNMENTTSGFLGPLLVLQAGFFLLTRILTIPQSLDSWWTSLNFLGGAPTCPGQNSQSPTSNHSPTSCPPICPGYRWMCLRRFIIFLFILLLCLIFLLVLLDYQGMLPVCPLLPGTSTTSTGPCKTCTIPAQGTSMFPSCCCTKPSDGNCTCIPIPSSWAFARFLWEWASVRFSWLSLLVPFVQWFVGLSPTVWLSVIWMMWYWGPSLYNILSPFLPLLPIFFCLWVYI

SEQ ID NO: 237 - protein, 1622 aa, synthetic construct
  REGION 1..1622: note = Recombinant Sequence
MFVFLVLLPLVSSQCVNLTTRTQLPPAYTNSFTRGVYYPDKVFRSSVLHSTQDLFLPFFSNVTWFHAIHVSGTNGTKRFDNPVLPFNDGVYFASTEKSNIIRGWIFGTTLDSKTQSLLIVNNATNVVIKVCEFQFCNDPFLGVYYHKNNKSWMESEFRVYSSANNCTFEYVSQPFLMDLEGKQGNFKNLREFVFKNIDGYFKIYSKHTPINLVRDLPQGFSALEPLVDLPIGINITRFQTLLALHRSYLTPGDSSSGWTAGAAAYYVGYLQPRTFLLKYNENGTITDAVDCALDPLSETKCTLKSFTVEKGIYQTSNFRVQPTESIVRFPNITNLCPFGEVFNATRFASVYAWNRKRISNCVADYSVLYNSASFSTFKCYGVSPTKLNDLCFTNVYADSFVIRGDEVRQIAPGQTGKIADYNYKLPDDFTGCVIAWNSNNLDSKVGGNYNYLYRLFRKSNLKPFERDISTEIYQAGSTPCNGVEGFNCYFPLQSYGFQPTTGVGYQPYRVVVLSFELLHAPATVCGPKKSTNLVKNKCVNFNFNGLTGTGVLTESNKKFLPFQQFGRDIADTTDAVRDPQTLEILDITPCSFGGVSVITPGTNTSNQVAVLYQDVNCTEVPVAIHADQLTPTWRVYSTGSNVFQTRAGCLIGAEHVNNSYECDIPIGAGICASYQTQTNSPGSASSVASQSIIAYTMSLGAENSVAYSNNSIAIPTNFTISVTTEILPVSMTKTSVDCTMYICGDSTECSNLLLQYGSFCTQLNRALTGIAVEQDKNTQEVFAQVKQIYKTPPIKDFGGFNFSQILPDPSKPSKRSPIEDLLFNKVTLADAGFIKQYGDCLGDIAARDLICAQKFNGLTVLPPLLTDEMIAQYTSALLAGTITSGWTFGAGPALQIPFPMQMAYRFNGIGVTQNVLYENQKLIANQFNSAIGKIQDSLSSTPSALGKLQDVVNQNAQALNTLVKQLSSNFGAISSVLNDILSRLDPPEAEVQIDRLITGRLQSLQTYVTQQLIRAAEIRASANLAATKMSECVLGQSKRVDFCGKGYHLMSFPQSAPHGVVFLHVTYVPAQEKNFTTAPAICHDGKAHFPREGVFVSNGTHWFVTQRNFYEPQIITTDNTFVSGNCDVVIGIVNNTVYDPLQPELDSFKEELDKYFKNHTSPDVDLGDISGINASVVNIQKEIDRLNEVAKNLNESLIDLQELGKYGSGSGSGSGSGSGSGSMGGWSSKPRQGMGTNLSVPNPLGFFPDHQLDPAFGANSNNPDWDFNPNKDQWPEANQVGAGAFGPGFTPPHGGLLGWSPQAQGILTTVPAAPPPASTNRQSGRQPTPISPPLRDSHPQAMQWNSTTFHQALLDPRVRGLYFPAGGSSSGTVNPVPTTASPISSIFSRTGDPAPNMENTTSGFLGPLLVLQAGFFLLTRILTIPQSLDSWWTSLNFLGGAPTCPGQNSQSPTSNHSPTSCPPICPGYRWMCLRRFIIFLFILLLCLIFLLVLLDYQGMLPVCPLLPGTSTTSTGPCKTCTIPAQGTSMFPSCCCTKPSDGNCTCIPIPSSWAFARFLWEWASVRFSWLSLLVPFVQWFVGLSPTVWLSVIWMMWYWGPSLYNILSPFLPLLPIFFCLWVYI

SEQ ID NO: 238 - protein, 1622 aa, synthetic construct
  REGION 1..1622: note = Recombinant Sequence
MFVFFVLLPLVSSQCVNLTTRTQLPPAYTNSFTRGVYYPDKVFRSSVLHSTQDLFLPFFSNVTWFHAIHVSGTNGTKRFDNPVLPFNDGVYFASIEKSNIIRGWIFGTTLDSKTQSLLIVNNATNVVIKVCEFQFCNDPFLGVYYHKNNKSWMESEFRVYSSANNCTFEYVSQPFLMDLEGKQGNFKNLREFVFKNIDGYFKIYSKHTPINLVRDLPQGFSALEPLVDLPIGINITRFQTLLALHRSYLTPGGSSSGWTAGAAAYYVGYLQPRTFLLKYNENGTITDAVDCALDPLSETKCTLKSFTVEKGIYQTSNFRVQPTESIVRFPNITNLCPFGEVFNATRFASVYAWNRKRISNCVADYSVLYNSASFSTFKCYGVSPTKLNDLCFTNVYADSFVIRGDEVRQIAPGQTGKIADYNYKLPDDFTGCVIAWNSNNLDSKVGGNYNYLYRLFRKSNLKPFERDISTEIYQAGSTPCNGVEGFNCYFPLQSYGFQPTNGVGYQPYRVVVLSFELLHAPATVCGPKKSTNLVKNKCVNFNFNGLTGTGVLTESNKKFLPFQQFGRDIADTTDAVRDPQTLEILDITPCSFGGVSVITPGTNTSNQVAVLYQGVNCTEVPVAIHADQLTPTWRVYSTGSNVFQTRAGCLIGAEHVNNSYECDIPIGAGICASYQTQTNSPGSASSVASQSIIAYTMSLGVENSVAYSNNSIAIPTNFTISVTTEILPVSMTKTSVDCTMYICGDSTECSNLLLQYGSFCTQLNRALTGIAVEQDKNTQEVFAQVKQIYKTPPIKDFGGFNFSQILPDPSKPSKRSPIEDLLFNKVTLADAGFIKQYGDCLGDIAARDLICAQKFNGLTVLPPLLTDEMIAQYTSALLAGTITSGWTFGAGPALQIPFPMQMAYRFNGIGVTQNVLYENQKLIANQFNSAIGKIQDSLSSTPSALGKLQDVVNQNAQALNTLVKQLSSNFGAISSVLNDILSRLDPPEAEVQIDRLITGRLQSLQTYVTQQLIRAAEIRASANLAATKMSECVLGQSKRVDFCGKGYHLMSFPQSAPHGVVFLHVTYVPAQEKNFTTAPAICHDGKAHFPREGVFVSNGTHWFVTQRNFYEPQIITTDNTFVSGNCDVVIGIVNNTVYDPLQPELDSFKEELDKYFKNHTSPDVDLGDISGINASVVNIQKEIDRLNEVAKNLNESLIDLQELGKYGSGSGSGSGSGSGSGSMGGWSSKPRQGMGTNLSVPNPLGFFPDHQLDPAFGANSNNPDWDFNPNKDQWPEANQVGAGAFGPGFTPPHGGLLGWSPQAQGILTTVPAAPPPASTNRQSGRQPTPISPPLRDSHPQAMQWNSTTFHQALLDPRVRGLYFPAGGSSSGTVNPVPTTASPISSIFSRTGDPAPNMENTTSGFLGPLLVLQAGFFLLTRILTIPQSLDSWWTSLNFLGGAPTCPGQNSQSPTSNHSPTSCPPICPGYRWMCLRRFIIFLFILLLCLIFLLVLLDYQGMLPVCPLLPGTSTTSTGPCKTCTIPAQGTSMFPSCCCTKPSDGNCTCIPIPSSWAFARFLWEWASVRFSWLSLLVPFVQWFVGLSPTVWLSVIWMMWYWGPSLYNILSPFLPLLPIFFCLWVYI

SEQ ID NO: 239 - protein, 1622 aa, synthetic construct
  REGION 1..1622: note = Recombinant Sequence
MFVFLVLLPLVSSQCVNLTTRTQLPPAYTNSFTRGVYYPDKVFRSSVLHSTQDLFLPFFSNVTWFHAIHVSGTNGTKRFDNPVLPFNDGVYFASTEKSNIIRGWIFGTTLDSKTQSLLIVNNATNVVIKVCEFQFCNDPFLSVYYHKNNKSWMESEFRVYSSANNCTFEYVSQPFLMDLVGKQGNFKNLREFVFKNIDGYFKIYSKHTPINLVRDLPQGFSALEPLVDLPIGINITRFQTLLALHRSYLTPGDSSSGWTAGAAAYYVGYLQPRTFLLKYNENGTITDAVDCALDPLSETKCTLKSFTVEKGIYQTSNFRVQPTESIVRFPNITNLCPFGEVFNATRFASVYAWNRKRISNCVADYSVLYNSASFSTFKCYGVSPTKLNDLCFTNVYADSFVIRGDEVRQIAPGQTGKIADYNYKLPDDFTGCVIAWNSNNLDSKVGGNYNYLYRLFRKSNLKPFERDISTEIYQAGSTPCNGVEGFNCYFPLQSYGFQPTNGVGYQPYRVVVLSFELLHAPATVCGPKKSTNLVKNKCVNFNFNGLTGTGVLTESNKKFLPFQQFGRDIADTTDAVRDPQTLEILDITPCSFGGVSVITPGTNTSNQVAVLYQGVNCTEVPVAIHADQLTPTWRVYSTGSNVFQTRAGCLIGAEHVNNSYECDIPIGAGICASYQTHTNSPGSASSVASQSIIAYTMSLGAENSVAYSNNSIAIPTNFTISVTTEILPVSMTKTSVDCTMYICGDSTECSNLLLQYGSFCTQLNRALTGIAVEQDKNTQEVFAQVKQIYKTPPIKDFGGFNFSQILPDPSKPSKRSPIEDLLFNKVTLADAGFIKQYGDCLGDIAARDLICAQKFNGLTVLPPLLTDEMIAQYTSALLAGTITSGWTFGAGPALQIPFPMQMAYRFNGIGVTQNVLYENQKLIANQFNSAIGKIQDSLSSTPSALGKLQDVVNQNAQALNTLVKQLSSNFGAISSVLNDILSRLDPPEAEVQIDRLITGRLQSLQTYVTQQLIRAAEIRASANLAATKMSECVLGQSKRVDFCGKGYHLMSFPQSAPHGVVFLHVTYVPAQEKNFTTAPAICHDGKAHFPREGVFVSNGTHWFVTQRNFYEPQIITTDNTFVSGNCDVVIGIVNNTVYDPLQPELDSFKEELDKYFKNHTSPDVDLGDISGINASVVNIQKEIDRLNEVAKNLNESLIDLQELGKYGSGSGSGSGSGSGSGSMGGWSSKPRQGMGTNLSVPNPLGFFPDHQLDPAFGANSNNPDWDFNPNKDQWPEANQVGAGAFGPGFTPPHGGLLGWSPQAQGILTTVPAAPPPASTNRQSGRQPTPISPPLRDSHPQAMQWNSTTFHQALLDPRVRGLYFPAGGSSSGTVNPVPTTASPISSIFSRTGDPAPNMENTTSGFLGPLLVLQAGFFLLTRILTIPQSLDSWWTSLNFLGGAPTCPGQNSQSPTSNHSPTSCPPICPGYRWMCLRRFIIFLFILLLCLIFLLVLLDYQGMLPVCPLLPGTSTTSTGPCKTCTIPAQGTSMFPSCCCTKPSDGNCTCIPIPSSWAFARFLWEWASVRFSWLSLLVPFVQWFVGLSPTVWLSVIWMMWYWGPSLYNILSPFLPLLPIFFCLWVYI

SEQ ID NO: 240 - protein, 1622 aa, synthetic construct
  REGION 1..1622: note = Recombinant Sequence
MFVFLVLLPLVSSQCVNLTTRTQLPPAYTNSFTRGVYYPDKVFRSSVLHSTQDLFLPFFSNVTWFHAIHVSGTNGTKRFDNPVLPFNDGVYFASTEKSNIIRGWIFGTTLDSKTQSLLIVNNATNVVIKVCEFQFCNDPFLGVYYHKNNKSWMESEFRVYSSANNCTFEYVSQPFLMDLEGKQGNFKNLREFVFKNIDGYFKIYSKHTPINLVRDLPQGFSALEPLVDLPIGINITRFQTLLALHRSYLTPGDSSSGWTAGAAAYYVGYLQPRTFLLKYNENGTITDAVDCALDPLSETKCTLKSFTVEKGIYQTSNFRVQPTESIVRFPNITNLCPFGEVFNATRFASVYAWNRKRISNCVADYSVLYNSASFSTFKCYGVSPTKLNDLCFTNVYADSFVIRGDEVRQIAPGQTGKIADYNYKLPDDFTGCVIAWNSNNLDSKVGGNYNYLYRLFRKSNLKPFERDISTEIYQAGSTPCNGVKGFNCYFPLQPYGFQPTYGVGYQPYRVVVLSFELLHAPATVCGPKKSTNLVKNKCVNFNFNGLTGTGVLTESNKKFLPFQQFGRDIADTTDAVRDPQTLEILDITPCSFGGVSVITPGTNTSNQVAVLYQGVNCTEVPVAIHADQLTPTWRVYSTGSNVFQTRAGCLIGAEHVNNSYECDIPIGAGICASYQTQTNSHGSASSVASQSIIAYTMSLGAENSVAYSNNSIAIPTNFTISVTTEILPVSMTKTSVDCTMYICGDSTECSNLLLQYGSFCTQLNRALTGIAVEQDKNTQEVFAQVKQIYKTPPIKDFGGFNFSQILPDPSKPSKRSPIEDLLFNKVTLADAGFIKQYGDCLGDIAARDLICAQKFNGLTVLPPLLTDEMIAQYTSALLAGTITSGWTFGAGPALQIPFPMQMAYRFNGIGVTQNVLYENQKLIANQFNSAIGKIQDSLSSTPSALGKLQDVVNQNAQALNTLVKQLSSNFGAISSVLNDILSRLDPPEAEVQIDRLITGRLQSLQTYVTQQLIRAAEIRASANLAATKMSECVLGQSKRVDFCGKGYHLMSFPQSAPHGVVFLHVTYVPAQEKNFTTAPAICHDGKAHFPREGVFVSNGTHWFVTQRNFYKPQIITTDNTFVSGNCDVVIGIVNNTVYDPLQPELDSFKEELDKYFKNHTSPDVDLGDISGINASVVNIQKEIDRLNEVAKNLNESLIDLQELGKYGSGSGSGSGSGSGSGSMGGWSSKPRQGMGTNLSVPNPLGFFPDHQLDPAFGANSNNPDWDFNPNKDQWPEANQVGAGAFGPGFTPPHGGLLGWSPQAQGILTTVPAAPPPASTNRQSGRQPTPISPPLRDSHPQAMQWNSTTFHQALLDPRVRGLYFPAGGSSSGTVNPVPTTASPISSIFSRTGDPAPNMENTTSGFLGPLLVLQAGFFLLTRILTIPQSLDSWWTSLNFLGGAPTCPGQNSQSPTSNHSPTSCPPICPGYRWMCLRRFIIFLFILLLCLIFLLVLLDYQGMLPVCPLLPGTSTTSTGPCKTCTIPAQGTSMFPSCCCTKPSDGNCTCIPIPSSWAFARFLWEWASVRFSWLSLLVPFVQWFVGLSPTVWLSVIWMMWYWGPSLYNILSPFLPLLPIFFCLWVYI

SEQ ID NO: 241 - protein, 1621 aa, synthetic construct
  REGION 1..1621: note = Recombinant Sequence
MFVFLVLLPLVSSQCVNLTTRTQLPPAYTNSFTRGVYYPDKVFRSSVLHSTQDLFLPFFSNVTWFDAIHVSGTNGTKRFDNPVLPFNDGVYFASTEKSNIIRGWIFGTTLDSKTQSLLIVNNATNVVIKVCEFQFCNDPFLVVYHKNNKSWMESEFRVYSSANNCTFEYVSQPFLMDLEGKQGNFKNLREFVFKNIDGYFKIYSKHTPINLVRGLPQGFSALEPLVDLPIGINITRFQTLLALHRSYLTPGDSSSGWTAGAAAYYVGYLQPRTFLLKYNENGTITDAVDCALDPLSETKCTLKSFTVEKGIYQTSNFRVQPTESIVRFPNITNLCPFGEVFNATRFASVYAWNRKRISNCVADYSVLYNSASFSTFKCYGVSPTKLNDLCFTNVYADSFVIRGDEVRQIAPGQTGKIADYNYKLPDDFTGCVIAWNSNNLDSKVGGNYNYLYRLFRKSNLKPFERDISTEIYQAGSTPCNGAEGFNCYFPLQSYGFQPTNGVGYQPYRVVVLSFELLHAPATVCGPKKSTNLVKNKCVNFNFNGLTGTGVLTESNKKFLPFQQFGRDIADTTDAVRDPQTLEILDITPCSFGGVSVITPGTNTSNQVAVLYQDVNCTEVPVAIHADQLTPTWRVYSTGSNVFQTRAGCLIGAEYVNNSYECDIPIGASICASYQTQTNSPGSASSVASQSIIAYTMSLGAENSVAYSNNSIAIPTNFTISVTTEILPVSMTKTSVDCTMYICGDSTECSNLLLQYGSFCTQLNRALTGIAVEQDKNTQEVFAQVKQIYKTPPIKDFGGFNFSQILPDPSKPSKRSPIEDLLFNKVTLADAGFIKQYGDCLGDIAARDLICAQKFNGLTVLPPLLTDEMIAQYTSALLAGTITSGWTFGAGPALQIPFPMQMAYRFNGIGVTQNVLYENQKLIANQFNSAIGKIQDSLSSTPSALGKLRDVVNQNAQALNTLVKQLSSNFGAISSVLNDILSRLDPPEAEVQIDRLITGRLQSLQTYVTQQLIRAAEIRASANLAATKMSECVLGQSKRVDFCGKGYHLMSFPQSAPHGVVFLHVTYVPAQEKNFTTAPAICHDGKDHFPREGVFVSNGTHWFVTQRNFYEPQIITTDNTFVSGNCDVVIGIVNNTVYDPLQPELDSFKEELDKYFKNHTSPDVDLGDISGINASVVNIQKEIDRLNEVAKNLNESLIDLQELGKYGSGSGSGSGSGSGSGSMGGWSSKPRQGMGTNLSVPNPLGFFPDHQLDPAFGANSNNPDWDFNPNKDQWPEANQVGAGAFGPGFTPPHGGLLGWSPQAQGILTTVPAAPPPASTNRQSGRQPTPISPPLRDSHPQAMQWNSTTFHQALLDPRVRGLYFPAGGSSSGTVNPVPTTASPISSIFSRTGDPAPNMENTTSGFLGPLLVLQAGFFLLTRILTIPQSLDSWWTSLNFLGGAPTCPGQNSQSPTSNHSPTSCPPICPGYRWMCLRRFIIFLFILLLCLIFLLVLLDYQGMLPVCPLLPGTSTTSTGPCKTCTIPAQGTSMFPSCCCTKPSDGNCTCIPIPSSWAFARFLWEWASVRFSWLSLLVPFVQWFVGLSPTVWLSVIWMMWYWGPSLYNILSPFLPLLPIFFCLWVYI

SEQ ID NO: 242 - protein, 1622 aa, synthetic construct
  REGION 1..1622: note = Recombinant Sequence
MFVFLVLLPLVSSQCVNLTTRTQLPPAYTNSFTRGVYYPDKVFRSSVLHSTQDLFLPFFSNVTWFHAIHVSGTNGTKRFDNPVLPFNDGVYFASTEKSNIIRGWIFGTTLDSKTQSLLIVNNATNVVIKVCEFQFCNDPFLGVYYHKNNKSWMESEFRVYSSANNCTFEYVSQPFLMDLEGKQGNFKNLREFVFKNIDGYFKIYSKHTPINLVRDLPQGFSALEPLVDLPIGINITRFQTLLALHRSYLTPGDSSSGWTAGAAAYYVGYLQPRTFLLKYNENGTITDAVDCALDPLSETKCTLKSFTVEKGIYQTSNFRVQPTESIVRFPNITNLCPFGEVFNATRFASVYAWNRKRISNCVADYSVLYNSASFSTFKCYGVSPTKLNDLCFTNVYADSFVIRGDEVRQIAPGQTGKIADYNYKLPDDFTGCVIAWNSNNLDSKVGGNYNYLYRLFRKSNLKPFERDISTEIYQAGSTPCNGVEGFNCYFPLQPYGFQPTNGVGYQPYRVVVLSFELLHAPATVCGPKKSTNLVKNKCVNFNFNGLTGTGVLTESNKKFLPFQQFGRDIADTTDAVRDPQTLEILDITPCSFGGVSVITPGTNTSNQVAVLYQGVNCTEVPVAIHADQLTPTWRVYSTGSNVFQTRAGCLIGAEHVNNSYECDIPIGAGICASYQTQTNSHGSASSVASQSIIAYTMSLGAENSVAYSNNSIAIPINFTISVTTEILPVSMTKTSVDCTMYICGDSTECSNLLLQYGSFCTQLNRALTGIAVEQDKNTQEVFAQVKQIYKTPPIKDFGGFNFSQILPDPSKPSKRSPIEDLLFNKVTLADAGFIKQYGDCLGDIAARDLICAQKFNGLTVLPPLLTDEMIAQYTSALLAGTITSGWTFGAGPALQIPFPMQMAYRFNGIGVTQNVLYENQKLIANQFNSAIGKIQDSLSSTPSALGKLQDVVNQNAQALNTLVKQLSSNFGAISSVLNDILSRLDPPEAEVQIDRLITGRLQSLQTYVTQQLIRAAEIRASANLAATKMSECVLGQSKRVDFCGKGYHLMSFPQSAPHGVVFLHVTYVPAQEKNFTTAPAICHDGKAHFPREGVFVSNGTHWFVTQRNFYEPQIITTDNTFVSGNCDVVIGIVNNTVYDPLQPELDSFKEELDKYFKNHTSPDVDLGDISGINASVVNIQKEIDRLNEVAKNLNESLIDLQELGKYGSGSGSGSGSGSGSGSMGGWSSKPRQGMGTNLSVPNPLGFFPDHQLDPAFGANSNNPDWDFNPNKDQWPEANQVGAGAFGPGFTPPHGGLLGWSPQAQGILTTVPAAPPPASTNRQSGRQPTPISPPLRDSHPQAMQWNSTTFHQALLDPRVRGLYFPAGGSSSGTVNPVPTTASPISSIFSRTGDPAPNMENTTSGFLGPLLVLQAGFFLLTRILTIPQSLDSWWTSLNFLGGAPTCPGQNSQSPTSNHSPTSCPPICPGYRWMCLRRFIIFLFILLLCLIFLLVLLDYQGMLPVCPLLPGTSTTSTGPCKTCTIPAQGTSMFPSCCCTKPSDGNCTCIPIPSSWAFARFLWEWASVRFSWLSLLVPFVQWFVGLSPTVWLSVIWMMWYWGPSLYNILSPFLPLLPIFFCLWVYI

SEQ ID NO: 243 - protein, 1630 aa, synthetic construct
  REGION 1..1630: note = Recombinant Sequence
MFVFLVLLPLVSSQCVNLTTRTQLPPAYTNSFTRGVYYPDKVFRSSVLHSTQDLFLPFFSNVTWFHAIHVSGTNGTKRFDNPVLPFNDGVYFASTEKSNIIRGWIFGTTLDSKTQSLLIVNNATNVVIKVCEFQFCNDPFLGVYYHKNNKSWMESEFRVYSSANNCTFEYVSQPFLMDLEGKQGNFKNLREFVFKNIDGYFKIYSKHTPINLVRDLPQGFSALEPLVDLPIGINITRFQTLLALHRSYLTPGDSSSGWTAGAAAYYVGYLQPRTFLLKYNENGTITDAVDCALDPLSETKCTLKSFTVEKGIYQTSNFRVQPTESIVRFPNITNLCPFGEVFNATRFASVYAWNRKRISNCVADYSVLYNSASFSTFKCYGVSPTKLNDLCFTNVYADSFVIRGDEVRQIAPGQTGKIADYNYKLPDDFTGCVIAWNSNNLDSKVGGNYNYLYRLFRKSNLKPFERDISTEIYQAGSTPCNGVEGFNCYFPLQSYGFQPTNGVGYQPYRVVVLSFELLHAPATVCGPKKSTNLVKNKCVNFNFNGLTGTGVLTESNKKFLPFQQFGRDIADTTDAVRDPQTLEILDITPCSFGGVSVITPGTNTSNQVAVLYQDVNCTEVPVAIHADQLTPTWRVYSTGSNVFQTRAGCLIGAEHVNNSYECDIPIGAGICASYQTQTNSPGSASSVASQSIIAYTMSLGAENSVAYSNNSIAIPTNFTISVTTEILPVSMTKTSVDCTMYICGDSTECSNLLLQYGSFCTQLNRALTGIAVEQDKNTQEVFAQVKQIYKTPPIKDFGGFNFSQILPDPSKPSKRSPIEDLLFNKVTLADAGFIKQYGDCLGDIAARDLICAQKFNGLTVLPPLLTDEMIAQYTSALLAGTITSGWTFGAGPALQIPFPMQMAYRFNGIGVTQNVLYENQKLIANQFNSAIGKIQDSLSSTPSALGKLQDVVNQNAQALNTLVKQLSSNFGAISSVLNDILSRLDPPEAEVQIDRLITGRLQSLQTYVTQQLIRAAEIRASANLAATKMSECVLGQSKRVDFCGKGYHLMSFPQSAPHGVVFLHVTYVPAQEKNFTTAPAICHDGKAHFPREGVFVSNGTHWFVTQRNFYEPQIITTDNTFVSGNCDVVIGIVNNTVYDPLQPELDSFKEELDKYFKNHTSPDVDLGDISGINASVVNIQKEIDRLNEVAKNLNESLIDLQELGKYGSGSGSGSGSGSGSGSGSGSGSGSMGGWSSKPRQGMGTNLSVPNPLGFFPDHQLDPAFGANSNNPDWDFNPNKDQWPEANQVGAGAFGPGFTPPHGGLLGWSPQAQGILTTVPAAPPPASTNRQSGRQPTPISPPLRDSHPQAMQWNSTTFHQALLDPRVRGLYFPAGGSSSGTVNPVPTTASPISSIFSRTGDPAPNMENTTSGFLGPLLVLQAGFFLLTRILTIPQSLDSWWTSLNFLGGAPTCPGQNSQSPTSNHSPTSCPPICPGYRWMCLRRFIIFLFILLLCLIFLLVLLDYQGMLPVCPLLPGTSTTSTGPCKTCTIPAQGTSMFPSCCCTKPSDGNCTCIPIPSSWAFARFLWEWASVRFSWLSLLVPFVQWFVGLSPTVWLSVIWMMWYWGPSLYNILSPFLPLLPIFFCLWVYI

SEQ ID NO: 244 - protein, 1628 aa, synthetic construct
  REGION 1..1628: note = Recombinant Sequence
MFVFLVLLPLVSSQCVNLRTRTQLPPAYTNSFTRGVYYPDKVFRSSVLHSTQDLFLPFFSNVTWFHAIHVSGTNGTKRFDNPVLPFNDGVYFASTEKSNIIRGWIFGTTLDSKTQSLLIVNNATNVVIKVCEFQFCNDPFLDVYYHKNNKSWMESGVYSSANNCTFEYVSQPFLMDLEGKQGNFKNLREFVFKNIDGYFKIYSKHTPINLVRDLPQGFSALEPLVDLPIGINITRFQTLLALHRSYLTPGDSSSGWTAGAAAYYVGYLQPRTFLLKYNENGTITDAVDCALDPLSETKCTLKSFTVEKGIYQTSNFRVQPTESIVRFPNITNLCPFGEVFNATRFASVYAWNRKRISNCVADYSVLYNSASFSTFKCYGVSPTKLNDLCFTNVYADSFVIRGDEVRQIAPGQTGKIADYNYKLPDDFTGCVIAWNSNNLDSKVGGNYNYRYRLFRKSNLKPFERDISTEIYQAGSKPCNGVEGFNCYFPLQSYGFQPTNGVGYQPYRVVVLSFELLHAPATVCGPKKSTNLVKNKCVNFNFNGLTGTGVLTESNKKFLPFQQFGRDIADTTDAVRDPQTLEILDITPCSFGGVSVITPGTNTSNQVAVLYQGVNCTEVPVAIHADQLTPTWRVYSTGSNVFQTRAGCLIGAEHVNNSYECDIPIGAGICASYQTQTNSRGSASSVASQSIIAYTMSLGAENSVAYSNNSIAIPTNFTISVTTEILPVSMTKTSVDCTMYICGDSTECSNLLLQYGSFCTQLNRALTGIAVEQDKNTQEVFAQVKQIYKTPPIKDFGGFNFSQILPDPSKPSKRSPIEDLLFNKVTLADAGFIKQYGDCLGDIAARDLICAQKFNGLTVLPPLLTDEMIAQYTSALLAGTITSGWTFGAGPALQIPFPMQMAYRFNGIGVTQNVLYENQKLIANQFNSAIGKIQDSLSSTPSALGKLQNVVNQNAQALNTLVKQLSSNFGAISSVLNDILSRLDPPEAEVQIDRLITGRLQSLQTYVTQQLIRAAEIRASANLAATKMSECVLGQSKRVDFCGKGYHLMSFPQSAPHGVVFLHVTYVPAQEKNFTTAPAICHDGKAHFPREGVFVSNGTHWFVTQRNFYEPQIITTDNTFVSGNCDVVIGIVNNTVYDPLQPELDSFKEELDKYFKNHTSPDVDLGDISGINASVVNIQKEIDRLNEVAKNLNESLIDLQELGKYGSGSGSGSGSGSGSGSGSGSGSGSMGGWSSKPRQGMGTNLSVPNPLGFFPDHQLDPAFGANSNNPDWDFNPNKDQWPEANQVGAGAFGPGFTPPHGGLLGWSPQAQGILTTVPAAPPPASTNRQSGRQPTPISPPLRDSHPQAMQWNSTTFHQALLDPRVRGLYFPAGGSSSGTVNPVPTTASPISSIFSRTGDPAPNMENTTSGFLGPLLVLQAGFFLLTRILTIPQSLDSWWTSLNFLGGAPTCPGQNSQSPTSNHSPTSCPPICPGYRWMCLRRFIIFLFILLLCLIFLLVLLDYQGMLPVCPLLPGTSTTSTGPCKTCTIPAQGTSMFPSCCCTKPSDGNCTCIPIPSSWAFARFLWEWASVRFSWLSLLVPFVQWFVGLSPTVWLSVIWMMWYWGPSLYNILSPFLPLLPIFFCLWVYI

SEQ ID NO: 245 - protein, 1628 aa, synthetic construct
  REGION 1..1628: note = Recombinant Sequence
MFVFLVLLPLVSSQCVNLRTRTQLPPAYTNSFTRGVYYPDKVFRSSVLHSTQDLFLPFFSNVTWFHAIHFSGTNGTKRFDNPVLPFNDGVYFASIEKSNIIRGWIFGTTLDSKTQSLLIVNNATNVVIKVCEFQFCNDPFLDVYYHKNNKSWMESGVYSSANNCTFEYVSQPFLMDLEGKQGNFKNLREFVFKNIDGYFKIYSKHTPINLVRDLPQGFSVLEPLVDLPIGINITRFQTLLALHRSYLTPGDSSSGLTAGAAAYYVGYLQPRTFLLKYNENGTITDAVDCALDPLSETKCTLKSFTVEKGIYQTSNFRVQPTESIVRFPNITNLCPFGEVFNATRFASVYAWNRKRISNCVADYSVLYNSASFSTFKCYGVSPTKLNDLCFTNVYADSFVIRGDEVRQIAPGQTGNIADYNYKLPDDFTGCVIAWNSNNLDSKVGGNYNYRYRLFRKSNLKPFERDISTEIYQAGSKPCNGVEGFNCYFPLQSYGFQPTNGVGYQPYRVVVLSFELLHAPATVCGPKKSTNLVKNKCVNFNFNGLTGTGVLTESNKKFLPFQQFGRDIADTTDAVRDPQTLEILDITPCSFGGVSVITPGTNTSNQVAVLYQGVNCTEVPVAIHADQLTPTWRVYSTGSNVFQTRAGCLIGAEHVNNSYECDIPIGAGICASYQTQTNSRGSASSVASQSIIAYTMSLGAENSVAYSNNSIAIPTNFTISVTTEILPVSMTKTSVDCTMYICGDSTECSNLLLQYGSFCTQLNRALTGIAVEQDKNTQEVFAQVKQIYKTPPIKDFGGFNFSQILPDPSKPSKRSPIEDLLFNKVTLADAGFIKQYGDCLGDIAARDLICAQKFNGLTVLPPLLTDEMIAQYTSALLAGTITSGWTFGAGPALQIPFPMQMAYRFNGIGVTQNVLYENQKLIANQFNSAIGKIQDSLSSTPSALGKLQNVVNQNAQALNTLVKQLSSNFGAISSVLNDILSRLDPPEAEVQIDRLITGRLQSLQTYVTQQLIRAAEIRASANLAATKMSECVLGQSKRVDFCGKGYHLMSFPQSAPHGVVFLHVTYVPAQEKNFTTAPAICHDGKAHFPREGVFVSNGTHWFVTQRNFYEPQIITTDNTFVSGNCDVVIGIVNNTVYDPLQPELDSFKEELDKYFKNHTSPDVDLGDISGINASVVNIQKEIDRLNEVAKNLNESLIDLQELGKYGSGSGSGSGSGSGSGSGSGSGSGSMGGWSSKPRQGMGTNLSVPNPLGFFPDHQLDPAFGANSNNPDWDFNPNKDQWPEANQVGAGAFGPGFTPPHGGLLGWSPQAQGILTTVPAAPPPASTNRQSGRQPTPISPPLRDSHPQAMQWNSTTFHQALLDPRVRGLYFPAGGSSSGTVNPVPTTASPISSIFSRTGDPAPNMENTTSGFLGPLLVLQAGFFLLTRILTIPQSLDSWWTSLNFLGGAPTCPGQNSQSPTSNHSPTSCPPICPGYRWMCLRRFIIFLFILLLCLIFLLVLLDYQGMLPVCPLLPGTSTTSTGPCKTCTIPAQGTSMFPSCCCTKPSDGNCTCIPIPSSWAFARFLWEWASVRFSWLSLLVPFVQWFVGLSPTVWLSVIWMMWYWGPSLYNILSPFLPLLPIFFCLWVYI

SEQ ID NO: 246 - protein, 1627 aa, synthetic construct
  REGION 1..1627: note = Recombinant Sequence
MFVFLVLLPLVSSQCVNLTTRTQLPPAYTNSFTRGVYYPDKVFRSSVLHSTQDLFLPFFSNVTWFHAISGTNGTKRFDNPVLPFNDGVYFASTEKSNIIRGWIFGTTLDSKTQSLLIVNNATNVVIKVCEFQFCNDPFLGVYHKNNKSWMESEFRVYSSANNCTFEYVSQPFLMDLEGKQGNFKNLREFVFKNIDGYFKIYSKHTPINLVRDLPQGFSALEPLVDLPIGINITRFQTLLALHRSYLTPGDSSSGWTAGAAAYYVGYLQPRTFLLKYNENGTITDAVDCALDPLSETKCTLKSFTVEKGIYQTSNFRVQPTESIVRFPNITNLCPFGEVFNATRFASVYAWNRKRISNCVADYSVLYNSASFSTFKCYGVSPTKLNDLCFTNVYADSFVIRGDEVRQIAPGQTGKIADYNYKLPDDFTGCVIAWNSNNLDSKVGGNYNYLYRLFRKSNLKPFERDISTEIYQAGSTPCNGVEGFNCYFPLQSYGFQPTYGVGYQPYRVVVLSFELLHAPATVCGPKKSTNLVKNKCVNFNFNGLTGTGVLTESNKKFLPFQQFGRDIDDTTDAVRDPQTLEILDITPCSFGGVSVITPGTNTSNQVAVLYQGVNCTEVPVAIHADQLTPTWRVYSTGSNVFQTRAGCLIGAEHVNNSYECDIPIGAGICASYQTQTNSHGSASSVASQSIIAYTMSLGAENSVAYSNNSIAIPINFTISVTTEILPVSMTKTSVDCTMYICGDSTECSNLLLQYGSFCTQLNRALTGIAVEQDKNTQEVFAQVKQIYKTPPIKDFGGFNFSQILPDPSKPSKRSPIEDLLFNKVTLADAGFIKQYGDCLGDIAARDLICAQKFNGLTVLPPLLTDEMIAQYTSALLAGTITSGWTFGAGPALQIPFPMQMAYRFNGIGVTQNVLYENQKLIANQFNSAIGKIQDSLSSTPSALGKLQDVVNQNAQALNTLVKQLSSNFGAISSVLNDILARLDPPEAEVQIDRLITGRLQSLQTYVTQQLIRAAEIRASANLAATKMSECVLGQSKRVDFCGKGYHLMSFPQSAPHGVVFLHVTYVPAQEKNFTTAPAICHDGKAHFPREGVFVSNGTHWFVTQRNFYEPQIITTHNTFVSGNCDVVIGIVNNTVYDPLQPELDSFKEELDKYFKNHTSPDVDLGDISGINASVVNIQKEIDRLNEVAKNLNESLIDLQELGKYGSGSGSGSGSGSGSGSGSGSGSGSMGGWSSKPRQGMGTNLSVPNPLGFFPDHQLDPAFGANSNNPDWDFNPNKDQWPEANQVGAGAFGPGFTPPHGGLLGWSPQAQGILTTVPAAPPPASTNRQSGRQPTPISPPLRDSHPQAMQWNSTTFHQALLDPRVRGLYFPAGGSSSGTVNPVPTTASPISSIFSRTGDPAPNMENTTSGFLGPLLVLQAGFFLLTRILTIPQSLDSWWTSLNFLGGAPTCPGQNSQSPTSNHSPTSCPPICPGYRWMCLRRFIIFLFILLLCLIFLLVLLDYQGMLPVCPLLPGTSTTSTGPCKTCTIPAQGTSMFPSCCCTKPSDGNCTCIPIPSSWAFARFLWEWASVRFSWLSLLVPFVQWFVGLSPTVWLSVIWMMWYWGPSLYNILSPFLPLLPIFFCLWVYI

SEQ ID NO: 247 - protein, 1627 aa, synthetic construct
  REGION 1..1627: note = Recombinant Sequence
MFVFLVLLPLVSSQCVNLTTRTQLPPAYTNSFTRGVYYPDKVFRSSVLHSTQDLFLPFFSNVTWFHAISGTNGTKRFDNPVLPFNDGVYFASTEKSNIIRGWIFGTTLDSKTQSLLIVNNATNVVIKVCEFQFCNDPFLGVYHKNNKSWMESEFRVYSSANNCTFEYVSQPFLMDLEGKQGNFKNLREFVFKNIDGYFKIYSKHTPINLVRDLPQGFSALEPLVDLPIGINITRFQTLLALHRSYLTPGDSSSGWTAGAAAYYVGYLQPRTFLLKYNENGTITDAVDCALDPLSETKCTLKSFTVEKGIYQTSNFRVQPTESIVRFPNITNLCPFGEVFNATRFASVYAWNRKRISNCVADYSVLYNSASFSTFKCYGVSPTKLNDLCFTNVYADSFVIRGDEVRQIAPGQTGKIADYNYKLPDDFTGCVIAWNSNNLDSKVGGNYNYLYRLFRKSNLKPFERDISTEIYQAGSTPCNGVKGFNCYFPLQPYGFQPTYGVGYQPYRVVVLSFELLHAPATVCGPKKSTNLVKNKCVNFNFNGLTGTGVLTESNKKFLPFQQFGRDIDDTTDAVRDPQTLEILDITPCSFGGVSVITPGTNTSNQVAVLYQGVNCTEVPVAIHADQLTPTWRVYSTGSNVFQTRAGCLIGAEHVNNSYECDIPIGAGICASYQTQTNSHGSASSVASQSIIAYTMSLGAENSVAYSNNSIAIPINFTISVTTEILPVSMTKTSVDCTMYICGDSTECSNLLLQYGSFCTQLNRALTGIAVEQDKNTQEVFAQVKQIYKTPPIKDFGGFNFSQILPDPSKPSKRSPIEDLLFNKVTLADAGFIKQYGDCLGDIAARDLICAQKFNGLTVLPPLLTDEMIAQYTSALLAGTITSGWTFGAGPALQIPFPMQMAYRFNGIGVTQNVLYENQKLIANQFNSAIGKIQDSLSSTPSALGKLQDVVNQNAQALNTLVKQLSSNFGAISSVLNDILARLDPPEAEVQIDRLITGRLQSLQTYVTQQLIRAAEIRASANLAATKMSECVLGQSKRVDFCGKGYHLMSFPQSAPHGVVFLHVTYVPAQEKNFTTAPAICHDGKAHFPREGVFVSNGTHWFVTQRNFYEPQIITTHNTFVSGNCDVVIGIVNNTVYDPLQPELDSFKEELDKYFKNHTSPDVDLGDISGINASVVNIQKEIDRLNEVANNLNESLIDLQELGKYGSGSGSGSGSGSGSGSGSGSGSGSMGGWSSKPRQGMGTNLSVPNPLGFFPDHQLDPAFGANSNNPDWDFNPNKDQWPEANQVGAGAFGPGFTPPHGGLLGWSPQAQGILTTVPAAPPPASTNRQSGRQPTPISPPLRDSHPQAMQWNSTTFHQALLDPRVRGLYFPAGGSSSGTVNPVPTTASPISSIFSRTGDPAPNMENTTSGFLGPLLVLQAGFFLLTRILTIPQSLDSWWTSLNFLGGAPTCPGQNSQSPTSNHSPTSCPPICPGYRWMCLRRFIIFLFILLLCLIFLLVLLDYQGMLPVCPLLPGTSTTSTGPCKTCTIPAQGTSMFPSCCCTKPSDGNCTCIPIPSSWAFARFLWEWASVRFSWLSLLVPFVQWFVGLSPTVWLSVIWMMWYWGPSLYNILSPFLPLLPIFFCLWVYI

SEQ ID NO: 248 - protein, 1627 aa, synthetic construct
  REGION 1..1627: note = Recombinant Sequence
MFVFLVLLPLVSSQCVNFTTRTQLPPAYTNSFTRGVYYPDKVFRSSVLHSTQDLFLPFFSNVTWFHAIHVSGTNGTKRFANPVLPFNDGVYFASTEKSNIIRGWIFGTTLDSKTQSLLIVNNATNVVIKVCEFQFCNDPFLGVYYHKNNKSWMESEFRVYSSANNCTFEYVSQPFLMDLEGKQGNFKNLREFVFKNIDGYFKIYSKHTPINLVRGLPQGFSALEPLVDLPIGINITRFQTLHRSYLTPGDSSSGWTAGAAAYYVGYLQPRTFLLKYNENGTITDAVDCALDPLSETKCTLKSFTVEKGIYQTSNFRVQPTESIVRFPNITNLCPFGEVFNATRFASVYAWNRKRISNCVADYSVLYNSASFSTFKCYGVSPTKLNDLCFTNVYADSFVIRGDEVRQIAPGQTGNIADYNYKLPDDFTGCVIAWNSNNLDSKVGGNYNYLYRLFRKSNLKPFERDISTEIYQAGSTPCNGVKGFNCYFPLQSYGFQPTYGVGYQPYRVVVLSFELLHAPATVCGPKKSTNLVKNKCVNFNFNGLTGTGVLTESNKKFLPFQQFGRDIADTTDAVRDPQTLEILDITPCSFGGVSVITPGTNTSNQVAVLYQGVNCTEVPVAIHADQLTPTWRVYSTGSNVFQTRAGCLIGAEHVNNSYECDIPIGAGICASYQTQTNSPGSASSVASQSIIAYTMSLGVENSVAYSNNSIAIPTNFTISVTTEILPVSMTKTSVDCTMYICGDSTECSNLLLQYGSFCTQLNRALTGIAVEQDKNTQEVFAQVKQIYKTPPIKDFGGFNFSQILPDPSKPSKRSPIEDLLFNKVTLADAGFIKQYGDCLGDIAARDLICAQKFNGLTVLPPLLTDEMIAQYTSALLAGTITSGWTFGAGPALQIPFPMQMAYRFNGIGVTQNVLYENQKLIANQFNSAIGKIQDSLSSTPSALGKLQDVVNQNAQALNTLVKQLSSNFGAISSVLNDILSRLDPPEAEVQIDRLITGRLQSLQTYVTQQLIRAAEIRASANLAATKMSECVLGQSKRVDFCGKGYHLMSFPQSAPHGVVFLHVTYVPAQEKNFTTAPAICHDGKAHFPREGVFVSNGTHWFVTQRNFYEPQIITTDNTFVSGNCDVVIGIVNNTVYDPLQPELDSFKEELDKYFKNHTSPDVDLGDISGINASVVNIQKEIDRLNEVAKNLNESLIDLQELGKYGSGSGSGSGSGSGSGSGSGSGSGSMGGWSSKPRQGMGTNLSVPNPLGFFPDHQLDPAFGANSNNPDWDFNPNKDQWPEANQVGAGAFGPGFTPPHGGLLGWSPQAQGILTTVPAAPPPASTNRQSGRQPTPISPPLRDSHPQAMQWNSTTFHQALLDPRVRGLYFPAGGSSSGTVNPVPTTASPISSIFSRTGDPAPNMENTTSGFLGPLLVLQAGFFLLTRILTIPQSLDSWWTSLNFLGGAPTCPGQNSQSPTSNHSPTSCPPICPGYRWMCLRRFIIFLFILLLCLIFLLVLLDYQGMLPVCPLLPGTSTTSTGPCKTCTIPAQGTSMFPSCCCTKPSDGNCTCIPIPSSWAFARFLWEWASVRFSWLSLLVPFVQWFVGLSPTVWLSVIWMMWYWGPSLYNILSPFLPLLPIFFCLWVYI

SEQ ID NO: 249 - protein, 1630 aa, synthetic construct
  REGION 1..1630: note = Recombinant Sequence
MFVFLVLLPLVSSQCVNFTNRTQLPSAYTNSFTRGVYYPDKVFRSSVLHSTQDLFLPFFSNVTWFHAIHVSGTNGTKRFDNPVLPFNDGVYFASTEKSNIIRGWIFGTTLDSKTQSLLIVNNATNVVIKVCEFQFCNYPFLGVYYHKNNKSWMESEFRVYSSANNCTFEYVSQPFLMDLEGKQGNFKNLSEFVFKNIDGYFKIYSKHTPINLVRDLPQGFSALEPLVDLPIGINITRFQTLLALHRSYLTPGDSSSGWTAGAAAYYVGYLQPRTFLLKYNENGTITDAVDCALDPLSETKCTLKSFTVEKGIYQTSNFRVQPTESIVRFPNITNLCPFGEVFNATRFASVYAWNRKRISNCVADYSVLYNSASFSTFKCYGVSPTKLNDLCFTNVYADSFVIRGDEVRQIAPGQTGTIADYNYKLPDDFTGCVIAWNSNNLDSKVGGNYNYLYRLFRKSNLKPFERDISTEIYQAGSTPCNGVKGFNCYFPLQSYGFQPTYGVGYQPYRVVVLSFELLHAPATVCGPKKSTNLVKNKCVNFNFNGLTGTGVLTESNKKFLPFQQFGRDIADTTDAVRDPQTLEILDITPCSFGGVSVITPGTNTSNQVAVLYQGVNCTEVPVAIHADQLTPTWRVYSTGSNVFQTRAGCLIGAEYVNNSYECDIPIGAGICASYQTQTNSPGSASSVASQSIIAYTMSLGAENSVAYSNNSIAIPTNFTISVTTEILPVSMTKTSVDCTMYICGDSTECSNLLLQYGSFCTQLNRALTGIAVEQDKNTQEVFAQVKQIYKTPPIKDFGGFNFSQILPDPSKPSKRSPIEDLLFNKVTLADAGFIKQYGDCLGDIAARDLICAQKFNGLTVLPPLLTDEMIAQYTSALLAGTITSGWTFGAGPALQIPFPMQMAYRFNGIGVTQNVLYENQKLIANQFNSAIGKIQDSLSSTPSALGKLQDVVNQNAQALNTLVKQLSSNFGAISSVLNDILSRLDPPEAEVQIDRLITGRLQSLQTYVTQQLIRAAEIRASANLAAIKMSECVLGQSKRVDFCGKGYHLMSFPQSAPHGVVFLHVTYVPAQEKNFTTAPAICHDGKAHFPREGVFVSNGTHWFVTQRNFYEPQIITTDNTFVSGNCDVVIGIVNNTVYDPLQPELDSFKEELDKYFKNHTSPDVDLGDISGINASFVNIQKEIDRLNEVAKNLNESLIDLQELGKYGSGSGSGSGSGSGSGSGSGSGSGSMGGWSSKPRQGMGTNLSVPNPLGFFPDHQLDPAFGANSNNPDWDFNPNKDQWPEANQVGAGAFGPGFTPPHGGLLGWSPQAQGILTTVPAAPPPASTNRQSGRQPTPISPPLRDSHPQAMQWNSTTFHQALLDPRVRGLYFPAGGSSSGTVNPVPTTASPISSIFSRTGDPAPNMENTTSGFLGPLLVLQAGFFLLTRILTIPQSLDSWWTSLNFLGGAPTCPGQNSQSPTSNHSPTSCPPICPGYRWMCLRRFIIFLFILLLCLIFLLVLLDYQGMLPVCPLLPGTSTTSTGPCKTCTIPAQGTSMFPSCCCTKPSDGNCTCIPIPSSWAFARFLWEWASVRFSWLSLLVPFVQWFVGLSPTVWLSVIWMMWYWGPSLYNILSPFLPLLPIFFCLWVYI

SEQ ID NO: 250 - protein, 1630 aa, synthetic construct
  REGION 1..1630: note = Recombinant Sequence
MFVFLVLLPLVSSQCVNLTTRTQLPPAYTNSFTRGVYYPDKVFRSSVLHSTQDLFLPFFSNVTWFHAIHVSGTNGTKRFDNPVLPFNDGVYFASIEKSNIIRGWIFGTTLDSKTQSLLIVNNATNVVIKVCEFQFCNDPFLDVYYHKNNKSWMKSEFRVYSSANNCTFEYVSQPFLMDLEGKQGNFKNLREFVFKNIDGYFKIYSKHTPINLVRDLPQGFSALEPLVDLPIGINITRFQTLLALHRSYLTPGDSSSGWTAGAAAYYVGYLQPRTFLLKYNENGTITDAVDCALDPLSETKCTLKSFTVEKGIYQTSNFRVQPTESIVRFPNITNLCPFGEVFNATRFASVYAWNRKRISNCVADYSVLYNSASFSTFKCYGVSPTKLNDLCFTNVYADSFVIRGDEVRQIAPGQTGKIADYNYKLPDDFTGCVIAWNSNNLDSKVGGNYNYRYRLFRKSNLKPFERDISTEIYQAGSTPCNGVQGFNCYFPLQSYGFQPTNGVGYQPYRVVVLSFELLHAPATVCGPKKSTNLVKNKCVNFNFNGLTGTGVLTESNKKFLPFQQFGRDIADTTDAVRDPQTLEILDITPCSFGGVSVITPGTNTSNQVAVLYQGVNCTEVPVAIHADQLTPTWRVYSTGSNVFQTRAGCLIGAEHVNNSYECDIPIGAGICASYQTQTNSRGSASSVASQSIIAYTMSLGAENSVAYSNNSIAIPTNFTISVTTEILPVSMTKTSVDCTMYICGDSTECSNLLLQYGSFCTQLNRALTGIAVEQDKNTQEVFAQVKQIYKTPPIKDFGGFNFSQILPDPSKPSKRSPIEDLLFNKVTLADAGFIKQYGDCLGDIAARDLICAQKFNGLTVLPPLLTDEMIAQYTSALLAGTITSGWTFGAGPALQIPFPMQMAYRFNGIGVTQNVLYENQKLIANQFNSAIGKIQDSLSSTPSALGKLQDVVNQNAQALNTLVKQLSSNFGAISSVLNDILSRLDPPEAEVQIDRLITGRLQSLQTYVTQQLIRAAEIRASANLAATKMSECVLGQSKRVDFCGKGYHLMSFPQSAPHGVVFLHVTYVPAHEKNFTTAPAICHDGKAHFPREGVFVSNGTHWFVTQRNFYEPQIITTDNTFVSGNCDVVIGIVNNTVYDPLQPELDSFKEELDKYFKNHTSPDVDLGDISGINASVVNIQKEIDRLNEVAKNLNESLIDLQELGKYGSGSGSGSGSGSGSGSGSGSGSGSMGGWSSKPRQGMGTNLSVPNPLGFFPDHQLDPAFGANSNNPDWDFNPNKDQWPEANQVGAGAFGPGFTPPHGGLLGWSPQAQGILTTVPAAPPPASTNRQSGRQPTPISPPLRDSHPQAMQWNSTTFHQALLDPRVRGLYFPAGGSSSGTVNPVPTTASPISSIFSRTGDPAPNMENTTSGFLGPLLVLQAGFFLLTRILTIPQSLDSWWTSLNFLGGAPTCPGQNSQSPTSNHSPTSCPPICPGYRWMCLRRFIIFLFILLLCLIFLLVLLDYQGMLPVCPLLPGTSTTSTGPCKTCTIPAQGTSMFPSCCCTKPSDGNCTCIPIPSSWAFARFLWEWASVRFSWLSLLVPFVQWFVGLSPTVWLSVIWMMWYWGPSLYNILSPFLPLLPIFFCLWVYI

SEQ ID NO: 251 - protein, 1623 aa, synthetic construct
  REGION 1..1623: note = Recombinant Sequence
MFVFLVLLPLVSSQCVNLTTRTQLPPAYTNSFTRGVYYPDKVFRSSVLHSTQDLFLPFFSNVTWFHAIHVSGTNVIKRFDNPVLPFNDGVYFASTEKSNIIRGWIFGTTLDSKTQSLLIVNNATNVVIKVCEFQFCNDPFLGVYYHKNNKSWMESEFRVYSSANNCTFEYVSQPFLMDLEGKQGNFKNLREFVFKNIDGYFKIYSKHTPINLVRDLPQGFSALEPLVDLPIGINITRFQTLLALHNSSSGWTAGAAAYYVGYLQPRTFLLKYNENGTITDAVDCALDPLSETKCTLKSFTVEKGIYQTSNFRVQPTESIVRFPNITNLCPFGEVFNATRFASVYAWNRKRISNCVADYSVLYNSASFSTFKCYGVSPTKLNDLCFTNVYADSFVIRGDEVRQIAPGQTGKIADYNYKLPDDFTGCVIAWNSNNLDSKVGGNYNYQYRLFRKSNLKPFERDISTEIYQAGSTPCNGVEGFNCYSPLQSYGFQPTNGVGYQPYRVVVLSFELLHAPATVCGPKKSTNLVKNKCVNFNFNGLTGTGVLTESNKKFLPFQQFGRDIADTTDAVRDPQTLEILDITPCSFGGVSVITPGTNTSNQVAVLYQGVNCTEVPVAIHADQLTPTWRVYSTGSNVFQTRAGCLIGAEHVNNSYECDIPIGAGICASYQTQTNSPGSASSVASQSIIAYTMSLGAENSVAYSNNSIAIPTNFTISVTTEILPVSMTKTSVDCTMYICGDSTECSNLLLQYGSFCTQLNRALTGIAVEQDKNTQEVFAQVKQIYKTPPIKDFGGFNFSQILPDPSKPSKRSPIEDLLFNKVTLADAGFIKQYGDCLGDIAARDLICAQKFNGLNVLPPLLTDEMIAQYTSALLAGTITSGWTFGAGPALQIPFPMQMAYRFNGIGVTQNVLYENQKLIANQFNSAIGKIQDSLSSTPSALGKLQDVVNQNAQALNTLVKQLSSNFGAISSVLNDILSRLDPPEAEVQIDRLITGRLQSLQTYVTQQLIRAAEIRASANLAATKMSECVLGQSKRVDFCGKGYHLMSFPQSAPHGVVFLHVTYVPAQEKNFTTAPAICHDGKAHFPREGVFVSNGTHWFVTQRNFYEPQIITTDNTFVSGNCDVVIGIVNNTVYDPLQPELDSFKEELDKYFKNHTSPDVDLGDISGINASVVNIQKEIDRLNEVAKNLNESLIDLQELGKYGSGSGSGSGSGSGSGSGSGSGSGSMGGWSSKPRQGMGTNLSVPNPLGFFPDHQLDPAFGANSNNPDWDFNPNKDQWPEANQVGAGAFGPGFTPPHGGLLGWSPQAQGILTTVPAAPPPASTNRQSGRQPTPISPPLRDSHPQAMQWNSTTFHQALLDPRVRGLYFPAGGSSSGTVNPVPTTASPISSIFSRTGDPAPNMENTTSGFLGPLLVLQAGFFLLTRILTIPQSLDSWWTSLNFLGGAPTCPGQNSQSPTSNHSPTSCPPICPGYRWMCLRRFIIFLFILLLCLIFLLVLLDYQGMLPVCPLLPGTSTTSTGPCKTCTIPAQGTSMFPSCCCTKPSDGNCTCIPIPSSWAFARFLWEWASVRFSWLSLLVPFVQWFVGLSPTVWLSVIWMMWYWGPSLYNILSPFLPLLPIFFCLWVYI

SEQ ID NO: 252 - protein, 1622 aa, synthetic construct
  REGION 1..1622: note = Recombinant Sequence
MFVFLVLLPLVSSQCVNLTTRTQLPPAYTNSFTRGVYYPDKVFRSSVLHSTQDLFLPFFSNVTWFHAIHVSGTNVIKRFDNPVLPFNDGVYFASTEKSNIIRGWIFGTTLDSKTQSLLIVNNATNVVIKVCEFQFCNDPFLGVYYHKNNKSWMESEFRVYSSANNCTFEYVSQPFLMDLEGKQGNFKNLREFVFKNIDGYFKIYSKHTPINLVRDLPQGFSALEPLVDLPIGINITRFQTLLALHSSSGWTAGAAAYYVGYLQPRTFLLKYNENGTITDAVDCALDPLSETKCTLKSFTVEKGIYQTSNFRVQPTESIVRFPNITNLCPFGEVFNATRFASVYAWNRKRISNCVADYSVLYNSASFSTFKCYGVSPTKLNDLCFTNVYADSFVIRGDEVRQIAPGQTGKIADYNYKLPDDFTGCVIAWNSNNLDSKVGGNYNYQYRLFRKSNLKPFERDISTEIYQAGSTPCNGVEGFNCYSPLQSYGFQPTNGVGYQPYRVVVLSFELLHAPATVCGPKKSTNLVKNKCVNFNFNGLTGTGVLTESNKKFLPFQQFGRDIADTTDAVRDPQTLEILDITPCSFGGVSVITPGTNTSNQVAVLYQGVNCTEVPVAIHADQLTPTWRVYSTGSNVFQTRAGCLIGAEHVNNSYECDIPIGAGICASYQTQTNSPGSASSVASQSIIAYTMSLGAENSVAYSNNSIAIPTNFTISVTTEILPVSMTKTSVDCTMYICGDSTECSNLLLQYGSFCTQLNRALTGIAVEQDKNTQEVFAQVKQIYKTPPIKDFGGFNFSQILPDPSKPSKRSPIEDLLFNKVTLADAGFIKQYGDCLGDIAARDLICAQKFNGLNVLPPLLTDEMIAQYTSALLAGTITSGWTFGAGPALQIPFPMQMAYRFNGIGVTQNVLYENQKLIANQFNSAIGKIQDSLSSTPSALGKLQDVVNQNAQALNTLVKQLSSNFGAISSVLNDILSRLDPPEAEVQIDRLITGRLQSLQTYVTQQLIRAAEIRASANLAATKMSECVLGQSKRVDFCGKGYHLMSFPQSAPHGVVFLHVTYVPAQEKNFTTAPAICHDGKAHFPREGVFVSNGTHWFVTQRNFYEPQIITTDNTFVSGNCDVVIGIVNNTVYDPLQPELDSFKEELDKYFKNHTSPDVDLGDISGINASVVNIQKEIDRLNEVAKNLNESLIDLQELGKYGSGSGSGSGSGSGSGSGSGSGSGSMGGWSSKPRQGMGTNLSVPNPLGFFPDHQLDPAFGANSNNPDWDFNPNKDQWPEANQVGAGAFGPGFTPPHGGLLGWSPQAQGILTTVPAAPPPASTNRQSGRQPTPISPPLRDSHPQAMQWNSTTFHQALLDPRVRGLYFPAGGSSSGTVNPVPTTASPISSIFSRTGDPAPNMENTTSGFLGPLLVLQAGFFLLTRILTIPQSLDSWWTSLNFLGGAPTCPGQNSQSPTSNHSPTSCPPICPGYRWMCLRRFIIFLFILLLCLIFLLVLLDYQGMLPVCPLLPGTSTTSTGPCKTCTIPAQGTSMFPSCCCTKPSDGNCTCIPIPSSWAFARFLWEWASVRFSWLSLLVPFVQWFVGLSPTVWLSVIWMMWYWGPSLYNILSPFLPLLPIFFCLWVYI

SEQ ID NO: 253 - protein, 1630 aa, synthetic construct
  REGION 1..1630: note = Recombinant Sequence
MFVFLVLLPLVSSQCVNLTTRTQLPPAYTNSFTRGVYYPDKVFRSSVLHSTQDLFLPFFSNVTWFHAIHVSGTNGTKRFDNPVLPFNDGVYFASTEKSNIIRGWIFGTTLDSKTQSLLIVNNATNVVIKVCEFQFCNDPFLGVYYHKNNKSLMESEFRVYSSANNCTFEYVSQPFLMDLEGKQGNFKNLREFVFKNIDGYFKIYSKHTPINLVRDLPQGFSALEPLVDLPIGINITRFQTLLALHRSYLTPGDSSSGWTAGAAAYYVGYLQPRTFLLKYNENGTITDAVDCALDPLSETKCTLKSFTVEKGIYQTSNFRVQPTESIVRFPNITNLCPFGEVFNATRFASVYAWNRKRISNCVADYSVLYNSASFSTFKCYGVSPTKLNDLCFTNVYADSFVIRGDEVRQIAPGQTGKIADYNYKLPDDFTGCVIAWNSNNLDSKVGGNYNYLYRLFRKSNLKPFERDISTEIYQAGSTPCNGVKGFNCYFPLQSYGFQPTNGVGYQPYRVVVLSFELLHAPATVCGPKKSTNLVKNKCVNFNFNGLTGTGVLTESNKKFLPFQQFGRDIADTTDAVRDPQTLEILDITPCSFGGVSVITPGTNTSNQVAVLYQGVNCTEVPVAIHADQLTPTWRVYSTGSNVFQTRAGCLIGAEHVNNSYECDIPIGAGICASYQTQTNSPGSASSVASQSIIAYTMSLGAENSVAYSNNSIAIPTNFTISVTTEILPVSMTKTSVDCTMYICGDSTECSNLLLQYGSFCTQLNRALTVIAVEQDKNTQEVFAQVKQIYKTPPIKDFGGFNFSQILPDPSKPSKRSPIEDLLFNKVTLADAGFIKQYGDCLGDIAARDLICAQKFNGLTVLPPLLTDEMIAQYTSALLAGTITSGWTFGAGPALQIPFPMQMAYRFNGIGVTQNVLYENQKLIANQFNSAIGKIQDSLSSTPSALGKLQDVVNQNAQALNTLVKQLSSNFGAISSVLNDILSRLDPPEAEVQIDRLITGRLQSLQTYVTQQLIRAAEIRASANLAATKMSECVLGQSKRVDFCGKGYHLMSFPQSAPHGVVFLHVTYVPAQEKNFTTAPAICHDGKAHFPREGVFVSNGTHWFVTQRNFYEPQIITTDNTFVSGNCDVVIGIVNNTVYDPLQPELDSFKEELDKYFKNHTSPDVDLGDISGINASVVNIQKEIDRLNEVAKNLNESLIDLQELGKYGSGSGSGSGSGSGSGSGSGSGSGSMGGWSSKPRQGMGTNLSVPNPLGFFPDHQLDPAFGANSNNPDWDFNPNKDQWPEANQVGAGAFGPGFTPPHGGLLGWSPQAQGILTTVPAAPPPASTNRQSGRQPTPISPPLRDSHPQAMQWNSTTFHQALLDPRVRGLYFPAGGSSSGTVNPVPTTASPISSIFSRTGDPAPNMENTTSGFLGPLLVLQAGFFLLTRILTIPQSLDSWWTSLNFLGGAPTCPGQNSQSPTSNHSPTSCPPICPGYRWMCLRRFIIFLFILLLCLIFLLVLLDYQGMLPVCPLLPGTSTTSTGPCKTCTIPAQGTSMFPSCCCTKPSDGNCTCIPIPSSWAFARFLWEWASVRFSWLSLLVPFVQWFVGLSPTVWLSVIWMMWYWGPSLYNILSPFLPLLPIFFCLWVYI

SEQ ID NO: 254 - protein, 1630 aa, synthetic construct
  REGION 1..1630: note = Recombinant Sequence
MFVFLVLLPLVSSQCVNLTTRTQLPPAYTNSFTRGVYYPDKVFRSSVLHSTQDLFLPFFSNVTWFHAIHVSGTNGTKRFDNPVLPFNDGVYFASTEKSNIIRGWIFGTTLDSKTQSLLIVNNATNVVIKVCEFQFCNDPFLGVYYHKNNKSWMESEFRVYSSANNCTFEYVSQPFLMDLEGKQGNFKNLREFVFKNIDGYFKIYSKHTPINLVRDLPQGFSALEPLVDLPIGINITRFQTLLALHRSYLTPGDSSSGWTAGAAAYYVGYLQPRTFLLKYNENGTITDAVDCALDPLSETKCTLKSFTVEKGIYQTSNFRVQPTESIVRFPNITNLCPFGEVFNATRFASVYAWNRKRISNCVADYSVLYNSASFSTFKCYGVSPTKLNDLCFTNVYADSFVIRGDEVRQIAPGQTGKIADYNYKLPDDFTGCVIAWNSNNLDSKVGGNYNYLYRLFRKSNLKPFERDISTEIYQAGSKPCNGVEGFNCYFPLQSYGFQPTNGVGYQPYRVVVLSFELLHAPATVCGPKKSTNLVKNKCVNFNFNGLTGTGVLTESNKKFLPFQQFGRDIADTTDAVRDPQTLEILDITPCSFGGVSVITPGTNTSNQVAVLYQGVNCTEVPVAIHADQLTPTWRVYSTGSNVFQTRAGCLIGAEHVNNSYECDIPIGAGICASYQTQTNSHGSASSVASQSIIAYTMSLGAENSVAYSNNSIAIPTNFTISVTTEILPVSMAKTSVDCTMYICGDSTECSNLLLQYGSFCTQLNRALTGIAVEQDKNTQEVFAQVKQIYKTPPIKDFGGFNFSQILPDPSKPSKRSPIEDLLFNKVTLADAGFIKQYGDCLGDIAARDLICAQKFNGLTVLPPLLTDEMIAQYTSALLAGTITSGWTFGAGPALQIPFPMQMAYRFNGIGVTQNVLYENQKLIANQFNSAIGKIQDSLSSTPSALGKLQDVVNQNAQALNTLVKQLSSNFGAISSVLNDILSRLDPPEAEVQIDRLITGRLQSLQTYVTQQLIRAAEIRASANLAATKMSECVLGQSKRVDFCGKGYHLMSFPQSAPHGVVFLHVTYVPAQEKNFTTAPAICHDGKAHFPREGVFVSNGTHWFVTQRNFYEPQIITTDNTFVSGNCDVVIGIVNNTVYDPLQPELDSFKEELDKYFKNHTSPDVDLGDISGINASVVNIQKEIDRLNEVAKNLNESLIDLQELGKYGSGSGSGSGSGSGSGSGSGSGSGSMGGWSSKPRQGMGTNLSVPNPLGFFPDHQLDPAFGANSNNPDWDFNPNKDQWPEANQVGAGAFGPGFTPPHGGLLGWSPQAQGILTTVPAAPPPASTNRQSGRQPTPISPPLRDSHPQAMQWNSTTFHQALLDPRVRGLYFPAGGSSSGTVNPVPTTASPISSIFSRTGDPAPNMENTTSGFLGPLLVLQAGFFLLTRILTIPQSLDSWWTSLNFLGGAPTCPGQNSQSPTSNHSPTSCPPICPGYRWMCLRRFIIFLFILLLCLIFLLVLLDYQGMLPVCPLLPGTSTTSTGPCKTCTIPAQGTSMFPSCCCTKPSDGNCTCIPIPSSWAFARFLWEWASVRFSWLSLLVPFVQWFVGLSPTVWLSVIWMMWYWGPSLYNILSPFLPLLPIFFCLWVYI

SEQ ID NO: 255 - protein, 1627 aa, synthetic construct
  REGION 1..1627: note = Recombinant Sequence
MFVFLVLLPLVSSQCVNLTTRTQLPPAYTNSFTRGVYYPDKVFRSSVLHSTRDLFLPFFSNVTWFHVISGTNGTKRFDNPVLPFNDGVYFASTEKSNIIRGWIFGTTLDSKTQSLLIVNNATNVVIKVCEFQFCNDPFLGVYHKNNKSWMESEFRVYSSANNCTFEYVSQPFLMDLEGKQGNFKNLREFVFKNIDGYFKIYSKHTPINLVRDLPQGFSALEPLVDLPIGINITRFQTLLALHRSYLTPGDSSSGWTAGAAAYYVGYLQPRTFLLKYNENGTITDAVDCALDPLSETKCTLKSFTVEKGIYQTSNFRVQPTESIVRFPNITNLCPFGEVFNATRFASVYAWNRKRISNCVADYSVLYNSASFSTFKCYGVSPTKLNDLCFTNVYADSFVIRGDEVRQIAPGQTGKIADYNYKLPDDFTGCVIAWNSNNLDSKVGGNYNYLYRLFRKSNLKPFERDISTEIYQAGSTPCNGVKGFNCYFPLQSYGFQPTNGVGYQPYRVVVLSFELLHAPATVCGPKKSTNLVKNKCVNFNFNGLTGTGVLTESNKKFLPFQQFGRDIADTTDAVRDPQTLEILDITPCSFGGVSVITPGTNTSNQVAVLYQGVNCTEVPVAIHADQLTPTWRVYSTGSNVFQTRAGCLIGAEHVNNSYECDIPIGAGICASYQTHTNSPGSASSVASQSIIAYTMSLGAENSVAYSNNSIAIPTNFTISVTTEILPVSMTKTSVDCTMYICGDSTECSNLLLQYGSFCTQLNRALTGIAVEQDKNTQEVFAQVKQIYKTPPIKDFGGFNFSQILPDPSKPSKRSPIEDLLFNKVTLADAGFIKQYGDCLGDIAARDLICAQKFNGLTVLPPLLTDEMIAQYTSALLAGTITSGWTLGAGPALQIPFPMQMAYRFNGIGVTQNVLYENQKLIANQFNSAIGKIQDSLSSTPSALGKLQDVVNQNAQALNTLVKQLSSNFGAISSVLNDILSRLDPPEAEVQIDRLITGRLQSLQTYVTQQLIRAAEIRASANLAATKMSECVLGQSKRVDFCGKGYHLMSFPQSAPHGVVFLHVTYVPAQEKNFTTAPAICHDGKAHFPREGVFVSNGTHWFVTQRNFYEPQIITTDNTFVSGNCDVVIGIVNNTVYDPLQPELDSFKEELDKYFKNHTSPDVDLGDISGINASVVNIQKEIDRLNEVAKNLNESLIDLQELGKYGSGSGSGSGSGSGSGSGSGSGSGSMGGWSSKPRQGMGTNLSVPNPLGFFPDHQLDPAFGANSNNPDWDFNPNKDQWPEANQVGAGAFGPGFTPPHGGLLGWSPQAQGILTTVPAAPPPASTNRQSGRQPTPISPPLRDSHPQAMQWNSTTFHQALLDPRVRGLYFPAGGSSSGTVNPVPTTASPISSIFSRTGDPAPNMENTTSGFLGPLLVLQAGFFLLTRILTIPQSLDSWWTSLNFLGGAPTCPGQNSQSPTSNHSPTSCPPICPGYRWMCLRRFIIFLFILLLCLIFLLVLLDYQGMLPVCPLLPGTSTTSTGPCKTCTIPAQGTSMFPSCCCTKPSDGNCTCIPIPSSWAFARFLWEWASVRFSWLSLLVPFVQWFVGLSPTVWLSVIWMMWYWGPSLYNILSPFLPLLPIFFCLWVYI

SEQ ID NO: 256 - protein, 1630 aa, synthetic construct
  REGION 1..1630: note = Recombinant Sequence
MFVFFVLLPLVSSQCVNLTTRTQLPPAYTNSFTRGVYYPDKVFRSSVLHSTQDLFLPFFSNVTWFHAIHVSGTNGTKRFDNPVLPFNDGVYFASIEKSNIIRGWIFGTTLDSKTQSLLIVNNATNVVIKVCEFQFCNDPFLGVYYHKNNKSWMESEFRVYSSANNCTFEYVSQPFLMDLEGKQGNFKNLREFVFKNIDGYFKIYSKHTPINLVRDLPQGFSALEPLVDLPIGINITRFQTLLALHRSYLTPGGSSSGWTAGAAAYYVGYLQPRTFLLKYNENGTITDAVDCALDPLSETKCTLKSFTVEKGIYQTSNFRVQPTESIVRFPNITNLCPFGEVFNATRFASVYAWNRKRISNCVADYSVLYNSASFSTFKCYGVSPTKLNDLCFTNVYADSFVIRGDEVRQIAPGQTGKIADYNYKLPDDFTGCVIAWNSNNLDSKVGGNYNYLYRLFRKSNLKPFERDISTEIYQAGSTPCNGVKGFNCYFPLQSYGFQPTNGVGYQPYRVVVLSFELLHAPATVCGPKKSTNLVKNKCVNFNFNGLTGTGVLTESNKKFLPFQQFGRDIADTTDAVRDPQTLEILDITPCSFGGVSVITPGTNTSNQVAVLYQGVNCTEVPVAIHADQLTPTWRVYSTGSNVFQTRAGCLIGAEHVNNSYECDIPIGAGICASYQTQTNSPGSASSVASQSIIAYTMSLGVENSVAYSNNSIAIPTNFTISVTTEILPVSMTKTSVDCTMYICGDSTECSNLLLQYGSFCTQLNRALTGIAVEQDKNTQEVFAQVKQIYKTPPIKDFGGFNFSQILPDPSKPSKRSPIEDLLFNKVTLADAGFIKQYGDCLGDIAARDLICAQKFNGLTVLPPLLTDEMIAQYTSALLAGTITSGWTFGAGPALQIPFPMQMAYRFNGIGVTQNVLYENQKLIANQFNSAIGKIQDSLSSTPSALGKLQDVVNQNAQALNTLVKQLSSNFGAISSVLNDILSRLDPPEAEVQIDRLITGRLQSLQTYVTQQLIRAAEIRASANLAATKMSECVLGQSKRVDFCGKGYHLMSFPQSAPHGVVFLHVTYVPAQEKNFTTAPAICHDGKAHFPREGVFVSNGTHWFVTQRNFYEPQIITTDNTFVSGNCDVVIGIVNNTVYDPLQPELDSFKEELDKYFKNHTSPDVDLGDISGINASVVNIQKEIDRLNEVAKNLNESLIDLQELGKYGSGSGSGSGSGSGSGSGSGSGSGSMGGWSSKPRQGMGTNLSVPNPLGFFPDHQLDPAFGANSNNPDWDFNPNKDQWPEANQVGAGAFGPGFTPPHGGLLGWSPQAQGILTTVPAAPPPASTNRQSGRQPTPISPPLRDSHPQAMQWNSTTFHQALLDPRVRGLYFPAGGSSSGTVNPVPTTASPISSIFSRTGDPAPNMENTTSGFLGPLLVLQAGFFLLTRILTIPQSLDSWWTSLNFLGGAPTCPGQNSQSPTSNHSPTSCPPICPGYRWMCLRRFIIFLFILLLCLIFLLVLLDYQGMLPVCPLLPGTSTTSTGPCKTCTIPAQGTSMFPSCCCTKPSDGNCTCIPIPSSWAFARFLWEWASVRFSWLSLLVPFVQWFVGLSPTVWLSVIWMMWYWGPSLYNILSPFLPLLPIFFCLWVYI

SEQ ID NO: 257 - protein, 1630 aa, synthetic construct
  REGION 1..1630: note = Recombinant Sequence
MFVFLVLLPLVSIQCVNLTTRTQLPPAYTNSFTRGVYYPDKVFRSSVLHSTQDLFLPFFSNVTWFHAIHVSGTNGTKRFDNPVLPFNDGVYFASTEKSNIIRGWIFGTTLDSKTQSLLIVNNATNVVIKVCEFQFCNDPFLGVYYHKNNKSCMESEFRVYSSANNCTFEYVSQPFLMDLEGKQGNFKNLREFVFKNIDGYFKIYSKHTPINLVRDLPQGFSALEPLVDLPIGINITRFQTLLALHRSYLTPGDSSSGWTAGAAAYYVGYLQPRTFLLKYNENGTITDAVDCALDPLSETKCTLKSFTVEKGIYQTSNFRVQPTESIVRFPNITNLCPFGEVFNATRFASVYAWNRKRISNCVADYSVLYNSASFSTFKCYGVSPTKLNDLCFTNVYADSFVIRGDEVRQIAPGQTGKIADYNYKLPDDFTGCVIAWNSNNLDSKVGGNYNYRYRLFRKSNLKPFERDISTEIYQAGSTPCNGVEGFNCYFPLQSYGFQPTNGVGYQPYRVVVLSFELLHAPATVCGPKKSTNLVKNKCVNFNFNGLTGTGVLTESNKKFLPFQQFGRDIADTTDAVRDPQTLEILDITPCSFGGVSVITPGTNTSNQVAVLYQGVNCTEVPVAIHADQLTPTWRVYSTGSNVFQTRAGCLIGAEHVNNSYECDIPIGAGICASYQTQTNSPGSASSVASQSIIAYTMSLGAENSVAYSNNSIAIPTNFTISVTTEILPVSMTKTSVDCTMYICGDSTECSNLLLQYGSFCTQLNRALTGIAVEQDKNTQEVFAQVKQIYKTPPIKDFGGFNFSQILPDPSKPSKRSPIEDLLFNKVTLADAGFIKQYGDCLGDIAARDLICAQKFNGLTVLPPLLTDEMIAQYTSALLAGTITSGWTFGAGPALQIPFPMQMAYRFNGIGVTQNVLYENQKLIANQFNSAIGKIQDSLSSTPSALGKLQDVVNQNAQALNTLVKQLSSNFGAISSVLNDILSRLDPPEAEVQIDRLITGRLQSLQTYVTQQLIRAAEIRASANLAATKMSECVLGQSKRVDFCGKGYHLMSFPQSAPHGVVFLHVTYVPAQEKNFTTAPAICHDGKAHFPREGVFVSNGTHWFVTQRNFYEPQIITTDNTFVSGNCDVVIGIVNNTVYDPLQPELDSFKEELDKYFKNHTSPDVDLGDISGINASVVNIQKEIDRLNEVAKNLNESLIDLQELGKYGSGSGSGSGSGSGSGSGSGSGSGSMGGWSSKPRQGMGTNLSVPNPLGFFPDHQLDPAFGANSNNPDWDFNPNKDQWPEANQVGAGAFGPGFTPPHGGLLGWSPQAQGILTTVPAAPPPASTNRQSGRQPTPISPPLRDSHPQAMQWNSTTFHQALLDPRVRGLYFPAGGSSSGTVNPVPTTASPISSIFSRTGDPAPNMENTTSGFLGPLLVLQAGFFLLTRILTIPQSLDSWWTSLNFLGGAPTCPGQNSQSPTSNHSPTSCPPICPGYRWMCLRRFIIFLFILLLCLIFLLVLLDYQGMLPVCPLLPGTSTTSTGPCKTCTIPAQGTSMFPSCCCTKPSDGNCTCIPIPSSWAFARFLWEWASVRFSWLSLLVPFVQWFVGLSPTVWLSVIWMMWYWGPSLYNILSPFLPLLPIFFCLWVYI

SEQ ID NO: 258 - protein, 1629 aa, synthetic construct
  REGION 1..1629: note = Recombinant Sequence
MFVFLVLLPLVSSQCVNLTTRTQLPPAYTNSFTRGVYYPDKVFRSSVLHSTQDLFLPFFSNVTWFHAIHVSGTNGTKRFGNPVLPFNDGVYFASTEKSNIIRGWIFGTTLDSKTQSLLIVNNATNVVIKVCEFQFCNDPFLGVYHKNNKSWMESESRVYSSANNCTFEYVSQPFLMDLEGKQGNFKNLREFVFKNIDGYFKIYSKHTPINLVRDLPQGFSALEPLVDLPIGINITRFQTLLALHRSYLTPGDSSSGWTAGAAAYYVGYLQPRTFLLKYNENGTITDAVDCALDPLSETKCTLKSFTVEKGIYQTSNFRVQPTESIVRFPNITNLCPFGEVFNATRFASVYAWNRKRISNCVADYSVLYNSASFSTFKCYGVSPTKLNDLCFTNVYADSFVIRGDEVRQIAPGQTGKIADYNYKLPDDFTGCVIAWNSNNLDSKVGGNYNYRYRLFRKSNLKPFERDISTEIYQAGSTPCNGVEGFNCYFPLQSYGFQPTNGVGYQPYRVVVLSFELLHAPATVCGPKKSTNLVKNKCVNFNFNGLTGTGVLTESNKKFLPFQQFGRDIADTTDAVRDPQTLEILDITPCSFGGVSVITPGTNTSNQVAVLYQGVNCTEVPVAIHADQLTPTWRVYSTGSNVFQTRAGCLIGAEHVNNSYECDIPIGAGICASYQTQTNSPGSASSVASQSIIAYTMSLGAENSVAYSNNSIAIPTNFTISVTTEILPVSMTKTSVDCTMYICGDSTECSNLLLQYGSFCTQLNRALTGIAVEQDKNTQEVFAQVKQIYKTPPIKDFGGFNFSQILPDPSKPSKRSPIEDLLFNKVTLADAGFIKQYGDCLGDIAARDLICAQKFNGLNVLPPLLTDEMIAQYTSALLAGTITSGWTFGAGPALQIPFPMQMAYRFNGIGVTQNVLYENQKLIANQFNSAIGKIQDSLSSTPSALGKLQHVVNQNAQALNTLVKQLSSNFGAISSVLNDILSRLDPPEAEVQIDRLITGRLQSLQTYVTQQLIRAAEIRASANLAATKMSECVLGQSKRVDFCGKGYHLMSFPQSAPHGVVFLHVTYVPAQEKNFTTAPAICHDGKAHFPREGVFVSNGTHWFVTQRNFYEPQIITTDNTFVSGNCDVVIGIVNNTVYDPLQPELDSFKEELDKYFKNHTSPDVDLGDISGINASVVNIQKEIDRLNEVAKNLNESLIDLQELGKYGSGSGSGSGSGSGSGSGSGSGSGSMGGWSSKPRQGMGTNLSVPNPLGFFPDHQLDPAFGANSNNPDWDFNPNKDQWPEANQVGAGAFGPGFTPPHGGLLGWSPQAQGILTTVPAAPPPASTNRQSGRQPTPISPPLRDSHPQAMQWNSTTFHQALLDPRVRGLYFPAGGSSSGTVNPVPTTASPISSIFSRTGDPAPNMENTTSGFLGPLLVLQAGFFLLTRILTIPQSLDSWWTSLNFLGGAPTCPGQNSQSPTSNHSPTSCPPICPGYRWMCLRRFIIFLFILLLCLIFLLVLLDYQGMLPVCPLLPGTSTTSTGPCKTCTIPAQGTSMFPSCCCTKPSDGNCTCIPIPSSWAFARFLWEWASVRFSWLSLLVPFVQWFVGLSPTVWLSVIWMMWYWGPSLYNILSPFLPLLPIFFCLWVYI

SEQ ID NO: 259 - protein, 1630 aa, synthetic construct
  REGION 1..1630: note = Recombinant Sequence
MFVFLVLLPLVSSQCVNLTTRTQLPPAYTNSFTRGVYYPDKVFRSSVLHSTQDLFLPFFSNVTWFHAIHVSGTNGTKRFDNPVLPFNDGVYFASTEKSNIIRGWIFGTTLDSKTQSLLIVNNATNVVIKVCEFQFCNDPFLGVYYHKNNKSWMESEFRVYSSANNCTFEYVSQPFLMDLEGKQGNFKNLREFVFKNIDGYFKIYSKHTPINLVRDLPQGFSALEPLVDLPIGINITRFQTLLALHRSYLTPGDSSSGWTAGAAAYYVGYLQPRTFLLKYNENGTITDAVDCALDPLSETKCTLKSFTVEKGIYQTSNFRVQPTESIVRFPNITNLCPFGEVFNATRFASVYAWNRKRISNCVADYSVLYNSASFSTFKCYGVSPTKLNDLCFTNVYADSFVIRGDEVRQIAPGQTGKIADYNYKLPDDFTGCVIAWNSNNLDSKVGGNYNYLYRLFRKSNLKPFERDISTEIYQAGSTPCNGVKGFNCYFPLQSYGFQPTNGVGYQPYRVVVLSFELLHAPATVCGPKKSTNLVKNKCVNFNFNGLTGTGVLTESNKKFLPFQQFGRDIADTTDAVRDPQTLEILDITPCSFGGVSVITPGTNTSNQVAVLYQGVNCTEVPVAIHADQLTPTWRVYSTGSNVFQTRAGCLIGAEHVNNSYECDIPIGAGICASYQTQTNSPGSASSVASQSIIAYTMSLGAENSVAYSNNSIAIPTNFTISVTTEILPVSMTKTSVDCTMYICGDSTECSNLLLQYGSFCTQLNRALTGIAVEQDKNTQEVFAQVKQIYKTPPIKDFGGFNFSQILPDPSKPSKRSPIEDLLFNKVTLADAGFIKQYGDCLGDIAARDLICAQKFNGLTVLPPLLTDEMIAQYTSALLAGTITSGWTFGAGPALQIPFPMQMAYRFNGIGVTQNVLYENQKLIANQFNSAIGKIQDSLSSTPSALGKLQDVVNQNAQALNTLVKQLSSNFGAISSVLNDILSRLDPPEAEVQIDRLITGRLQSLQTYVTQQLIRAAEIRASANLAATKMSECVLGQSKRVDFCGKGYHLMSFPQSAPHGVVFLHVTYVPAQEKNFTTAPAICHDGKAHFPREGVFVSNGTHWFVTQRNFYEPQIITTDNTFVSGNCDVVIGIVNNTVYDPLQPELDSFKEELDKYFKNHTSPDVDLGDISGINASFVNIQKEIDRLNEVAKNLNESLIDLQELGKYGSGSGSGSGSGSGSGSGSGSGSGSMGGWSSKPRQGMGTNLSVPNPLGFFPDHQLDPAFGANSNNPDWDFNPNKDQWPEANQVGAGAFGPGFTPPHGGLLGWSPQAQGILTTVPAAPPPASTNRQSGRQPTPISPPLRDSHPQAMQWNSTTFHQALLDPRVRGLYFPAGGSSSGTVNPVPTTASPISSIFSRTGDPAPNMENTTSGFLGPLLVLQAGFFLLTRILTIPQSLDSWWTSLNFLGGAPTCPGQNSQSPTSNHSPTSCPPICPGYRWMCLRRFIIFLFILLLCLIFLLVLLDYQGMLPVCPLLPGTSTTSTGPCKTCTIPAQGTSMFPSCCCTKPSDGNCTCIPIPSSWAFARFLWEWASVRFSWLSLLVPFVQWFVGLSPTVWLSVIWMMWYWGPSLYNILSPFLPLLPIFFCLWVYI

SEQ ID NO: 260 - protein, 1630 aa, synthetic construct
  REGION 1..1630: note = Recombinant Sequence
MFVFLVLLPLVSSQCVNLTTRTQLPPAYTNSFTRGVYYPDKVFRSSVLHSTQDLFLPFFSNVTWFHAIHVSGTNGTKRFDNPVLPFNDGVYFASTEKSNIIRGWIFGTTLDSKTQSLLIVNNATNVVIKVCEFQFCNDPFLGVYYHKNNKSWMESELRVYSSANNCTFEYVSQPFLMDLEGKQGNFKNLREFVFKNIDGYFKIYSKHTPINLVRDLPQGFSALEPLVDLPIGINITRFQTLLALHRSYLTPGDSSSGWTAGAAAYYVGYLQPRTFLLKYNENGTITDAVDCALDPLSETKCTLKSFTVEKGIYQTSNFRVQPTESIVRFPNITNLCPFGEVFNATRFASVYAWNRKRISNCVADYSFLYNSASFSTFKCYGVSPTKLNDLCFTNVYADSFVIRGDEVRQIAPGQTGKIADYNYKLPDDFTGCVIAWNSNNLDSKVGGNYNYLYRLFRKSNLKPFERDISTEIYQAGSTPCNGVEGFNCYFPLQSYGFQPTNGVGYQPYRVVVLSFELLHAPATVCGPKKSTNLVKNKCVNFNFNGLTGTGVLTESNKKFLPFQQFGRDIADTTDAVRDPQTLEILDITPCSFGGVSVITPGTNTSNQVAVLYHGVNCTEVPVAIHADQLTPTWRVYSTGSNVFQTRAGCLIGAEHVNNSYECDIPIGAGICASYQTQTNSRGSASSVASQSIIAYTMSLGAENSVAYSNNSIAIPTNFTISVTTEILPVSMTKTSVDCTMYICGDSTECSNLLLQYGSFCTQLNRALTGIAVEQDKNTQEVFAQVKQIYKTPPIKDFGGFNFSQILPDPSKPSKRSPIEDLLFNKVTLADAGFIKQYGDCLGDIAARDLICAQKFNGLTVLPPLLTDEMIAQYTSALLAGTITSGWTFGAGPALQIPFPMQMAYRFNGIGVTQNVLYENQKLIANQFNSAIGKIQDSLSSTPSALGKLQDVVNQNAQALNTLVKQLSSNFGAISSVLNDILSRLDPPEAEVQIDRLITGRLQSLQTYVTQQLIRAAEIRASANLAATKMSECVLGQSKRVDFCGKGYHLMSFPQSAPHGVVFLHVTYVPAQEKNFTTAPAICHDGKAHFPREGVFVSNGTHWFVTQRNFYEPQIITTDNTFVSGNCDVVIGIVNNTVYDPLQPELDSFKEELDKYFKNHTSPDVDLGDISGINASVVNIQKEIDRLNEVAKNLNESLIDLQELGKYGSGSGSGSGSGSGSGSGSGSGSGSMGGWSSKPRQGMGTNLSVPNPLGFFPDHQLDPAFGANSNNPDWDFNPNKDQWPEANQVGAGAFGPGFTPPHGGLLGWSPQAQGILTTVPAAPPPASTNRQSGRQPTPISPPLRDSHPQAMQWNSTTFHQALLDPRVRGLYFPAGGSSSGTVNPVPTTASPISSIFSRTGDPAPNMENTTSGFLGPLLVLQAGFFLLTRILTIPQSLDSWWTSLNFLGGAPTCPGQNSQSPTSNHSPTSCPPICPGYRWMCLRRFIIFLFILLLCLIFLLVLLDYQGMLPVCPLLPGTSTTSTGPCKTCTIPAQGTSMFPSCCCTKPSDGNCTCIPIPSSWAFARFLWEWASVRFSWLSLLVPFVQWFVGLSPTVWLSVIWMMWYWGPSLYNILSPFLPLLPIFFCLWVYI

SEQ ID NO: 261 - protein, 1630 aa, synthetic construct
  REGION 1..1630: note = Recombinant Sequence
MFVFFVLLPLVSSQCVNLTTRTQLPPAYTNSFTRGVYYPDKVFRSSVLHSTQDLFLPFFSNVTWFHAIHVSGTNGTKRFDNPVLPFNDGVYFASIEKSNIIRGWIFGTTLDSKTQSLLIVNNATNVVIKVCEFQFCNDPFLGVYYHKNNKSWMESEFRVYSSANNCTFEYVSQPFLMDLEGKQGNFKNLREFVFKNIDGYFKIYSKHTPINLVRDLPQGFSALEPLVDLPIGINITRFQTLLALHRSYLTPGGSSSGWTAGAAAYYVGYLQPRTFLLKYNENGTITDAVDCALDPLSETKCTLKSFTVEKGIYQTSNFRVQPTESIVRFPNITNLCPFGEVFNATRFASVYAWNRKRISNCVADYSVLYNSASFSTFKCYGVSPTKLNDLCFTNVYADSFVIRGDEVRQIAPGQTGKIADYNYKLPDDFTGCVIAWNSNNLDSKVGGNYNYLYRLFRKSNLKPFERDISTEIYQAGNTPCNGVEGFNCYFPLQSYGFQPTNGVGYQPYRVVVLSFELLHAPATVCGPKKSTNLVKNKCVNFNFNGLTGTGVLTESNKKFLPFQQFGRDIADTTDAVRDPQTLEILDITPCSFGGVSVITPGTNTSNQVAVLYQGVNCTEVPVAIHADQLTPTWRVYSTGSNVFQTRAGCLIGAEHVNNSYECDIPIGAGICASYQTQTNSPGSASSVASQSIIAYTMSLGAENSVAYSNNSIAIPTNFTISVTTEILPVSMTKTSVDCTMYICGDSTECSNLLLQYGSFCTQLNRALTGIAVEQDKNTQEVFAQVKQIYKTPPIKDFGGFNFSQILPDPSKPSKRSPIEDLLFNKVTLADAGFIKQYGDCLGDIAARDLICAQKFNGLTVLPPLLTDEMIAQYTSALLAGTITSGWTFGAGPALQIPFPMQMAYRFNGIGVTQNVLYENQKLIANQFNSAIGKIQDSLSSTPSALGKLQDVVNQNARALNTLVKQLSSNFGAISSVLNDILSRLDPPEAEVQIDRLITGRLQSLQTYVTQQLIRAAEIRASANLAATKMSECVLGQSKRVDFCGKGYHLMSFPQSAPHGVVFLHVTYVPAQEKNFTTAPAICHDGKAHFPREGVFVSNGTHWFVTQRNFYEPQIITTDNTFVSGNCDVVIGIVNNTVYDPLQPELDSFKEELDKYFKNHTSPDVDLGDISGINASVVNIQKEIDRLNEVAKNLNESLIDLQELGKYGSGSGSGSGSGSGSGSGSGSGSGSMGGWSSKPRQGMGTNLSVPNPLGFFPDHQLDPAFGANSNNPDWDFNPNKDQWPEANQVGAGAFGPGFTPPHGGLLGWSPQAQGILTTVPAAPPPASTNRQSGRQPTPISPPLRDSHPQAMQWNSTTFHQALLDPRVRGLYFPAGGSSSGTVNPVPTTASPISSIFSRTGDPAPNMENTTSGFLGPLLVLQAGFFLLTRILTIPQSLDSWWTSLNFLGGAPTCPGQNSQSPTSNHSPTSCPPICPGYRWMCLRRFIIFLFILLLCLIFLLVLLDYQGMLPVCPLLPGTSTTSTGPCKTCTIPAQGTSMFPSCCCTKPSDGNCTCIPIPSSWAFARFLWEWASVRFSWLSLLVPFVQWFVGLSPTVWLSVIWMMWYWGPSLYNILSPFLPLLPIFFCLWVYI

SEQ ID NO: 262 - protein, 1625 aa, synthetic construct
  REGION 1..1625: note = Recombinant Sequence
MFVFLVLLPLVSSQCVNLTTRTQLPPAYTNSFTRGVYYPDKVFRSSVLHSTQDLFLPFFSNVTWFHAIHVSGTNGTKRFDNPVLPFNDGVYFASTEKSNIIRGWIFGTTLDSKTQSLLIVNNATNVVIKVCEFQFCNDPFYYHKNNKSWMESEFRVYSSANNCTFEYVSQPFLMDLEGKQGNFKNLREFVFKNIDGYFKIYSKHTPINLVRDLPQGFSALEPLVDLPIGINITRFQTLLHRSYLTPGDSSSGWTAGAAACYVGYLQPRTFLLKYNENGTITDAVDCALDPLSETKCTLKSFTVEKGIYQTSNFRVQPTESIVRFPNITNLCPFGEVFNATRFASVYAWNRKRISNCVADYSVLYNSASFSTFKCYGVSPTKLNDLCFTNVYADSFVIRGDEVRQIAPGQTGKIADYNYKLPDDFTGCVIAWNSNNLDSKVGGNYNYLYRLFRKSNLKPFERDISTEIYQAGSTPCNGVKGFNCYFPLQSYGFQPTYGVGYQPYRVVVLSFELLHAPATVCGPKKSTNLVKNKCVNFNFNGLTGTGVLTESNKKFLPFQQFGRDIADTTDAVRDPQTLEILDITPCSFGGVSVITPGTNTSNQVAVLYQGVNCTEVPVAIHADQLTPTWRVYSTGSNVFQTRAGCLIGAEHVNNSYECDIPIGAGICASYQTQTNSHGSASSVASQSIIAYTMSLGAENSVAYSNNSIAIPTNFTISVTTEILPVSMTKTSVDCTMYICGDSTECSNLLLQYGSFCTQLNRALTGIAVEQDKNTQEVFAQVKQIYKTPPIKDFGGFNFSQILPDPSKPSKRSPIEDLLFNKVTLADAGFIKQYGDCLGDIAARDLICAQKFNGLTVLPPLLTDEMIAQYTSALLAGTITSGWTFGAGPALQIPFPMQMAYRFNGIGVTQNVLYENQKLIANQFNSAIGKIQDSLSSTPSALGKLQDVVNQNAQALNTLVKQLSSNFGAISSVLNDILSRLDPPEAEVQIDRLITGRLQSLQTYVTQQLIRAAEIRASANLAATKMSECVLGQSKRVDFCGKGYHLMSFPQSAPHGVVFLHVTYVPAQEKNFTTAPAICHDGKAHFPRKGVFVSNGTYWFVTQRNFYEPQIITTDNTFVSGNCDVVIGIVNNTVYDPLQPELDSFKEELDKYFKNHTSPDVDLGDISGINASFVNIQKEIDRLNEVAKNLNESLIDLQELGKYGSGSGSGSGSGSGSGSGSGSGSGSMGGWSSKPRQGMGTNLSVPNPLGFFPDHQLDPAFGANSNNPDWDFNPNKDQWPEANQVGAGAFGPGFTPPHGGLLGWSPQAQGILTTVPAAPPPASTNRQSGRQPTPISPPLRDSHPQAMQWNSTTFHQALLDPRVRGLYFPAGGSSSGTVNPVPTTASPISSIFSRTGDPAPNMENTTSGFLGPLLVLQAGFFLLTRILTIPQSLDSWWTSLNFLGGAPTCPGQNSQSPTSNHSPTSCPPICPGYRWMCLRRFIIFLFILLLCLIFLLVLLDYQGMLPVCPLLPGTSTTSTGPCKTCTIPAQGTSMFPSCCCTKPSDGNCTCIPIPSSWAFARFLWEWASVRFSWLSLLVPFVQWFVGLSPTVWLSVIWMMWYWGPSLYNILSPFLPLLPIFFCLWVYI

SEQ ID NO: 263 - protein, 1630 aa, synthetic construct
  REGION 1..1630: note = Recombinant Sequence
MFVFLVLLPLVSSQCVNFTTRTQLPPAYTNSFTRGVYYPDKVFRSSVLHSTQDLFLPFFSNVTWFHAIHVSGTNGTKRFDNPVLPFNDGVYFASTEKSNIIRGWIFGTTLDSKTQSLLIVNNATNVVIKVCEFQFCNDPFLGVYYHKNNKSWMESEFRVYSSANNCTFEYVSQPFLMDLEGKQGNFKNLREFVFKNIDGYFKIYSKHTPINLVRDLPQGFSALEPLVDLPIGINITRFQTLLALHRSYLTPGDSSSGWTAGAAAYYVGYLQPRTFLLKYNENGTITDAVDCALDPLSETKCTLKSFTVEKGIYQTSNFRVQPTESIVRFPNITNLCPFGEVFNATRFASVYAWNRKRISNCVADYSVLYNSASFSTFKCYGVSPTKLNDLCFTNVYADSFVIRGDEVRQIAPGQTGKIADYNYKLPDDFTGCVIAWNSNNLDSKVGGNYNYRYRLFRKSNLKPFERDISTEIYQAGSTPCNGVEGFNCYFPLQSYGFQPTYGVGYQPYRVVVLSFELLHAPATVCGPKKSTNLVKNKCVNFNFNGLTGTGVLTESNKKFLPFQQFGRDIADTTDAVRDPQTLEILDITPCSFGGVSVITPGTNTSNQVAVLYQGVNCTEVPVAIHADQLTPTWRVYSTGSNVFQTRAGCLIGVEYVNNSYECDIPIGAGICASYQTQTNSPGSASSVASQSIIAYTMSLGAENSVAYSNNSIAIPTNFTISVTTEILPVSMTKTSVDCTMYICGDSTECSNLLLQYGSFCTQLNRALTGIAVEQDKNTQEVFAQVKQIYKTPPIKYFGGFNFSQILPDPSKPSKRSPIEDLLFNKVTLADAGFIKQYGDCLGDIAARDLICAQKFNGLTVLPPLLTDEMIAQYTSALLAGTITSGWTFGAGPALQIPFPMQMAYRFNGIGVTQNVLYENQKLIANQFNSAIGKIQDSLSSTPSALGKLQDVVNQNAQALNTLVKQLSSNFGAISSVLNDILSRLDPPEAEVQIDRLITGRLQSLQTYVTQQLIRAAEIRASANLAATKMSECVLGQSKRVDFCGKGYHLMSFPQSAPHGVVFLHVTYVPAQEKNFTTAPAICHDGKAHFPREGVFVSNGTHWFVTQRNFYEPQIITTDNTFVSGNCDVVIGIVNNTVYDPLQPELDSFKEELDKYFKNHTSPDVDLGDISGINASVVNIQKEIDRLNEVAKNLNESLIDLQELGKYGSGSGSGSGSGSGSGSGSGSGSGSMGGWSSKPRQGMGTNLSVPNPLGFFPDHQLDPAFGANSNNPDWDFNPNKDQWPEANQVGAGAFGPGFTPPHGGLLGWSPQAQGILTTVPAAPPPASTNRQSGRQPTPISPPLRDSHPQAMQWNSTTFHQALLDPRVRGLYFPAGGSSSGTVNPVPTTASPISSIFSRTGDPAPNMENTTSGFLGPLLVLQAGFFLLTRILTIPQSLDSWWTSLNFLGGAPTCPGQNSQSPTSNHSPTSCPPICPGYRWMCLRRFIIFLFILLLCLIFLLVLLDYQGMLPVCPLLPGTSTTSTGPCKTCTIPAQGTSMFPSCCCTKPSDGNCTCIPIPSSWAFARFLWEWASVRFSWLSLLVPFVQWFVGLSPTVWLSVIWMMWYWGPSLYNILSPFLPLLPIFFCLWVYI

SEQ ID NO: 264 - protein, 1630 aa, synthetic construct
  REGION 1..1630: note = Recombinant Sequence
MFVFLVLLPLVSSQCVNLTTRTQLPPAYTNSFTRGVYYPDKVFRSSVLHSTQDLFLPFFSNVTWFHAIHVSGTNGTKRFDNPVLPFNDGVYFASTEKSNIIRGWIFGTTLDSKTQSLLIVNNATNVVIKVCEFQFCNDPFLGVYYHKNNKSWMESEFRVYSSANNCTFEYVSQPFLMDLEGKQGNFKNLREFVFKNIDGYFKIYSKHTPINLVRDLPQGFSALEPLVDLPIGINITRFQTLLALHRSYLTPGDSSSGWTAGAAAYYVGYLQPRTFLLKYNENGTITDAVDCALDPLSETKCTLKSFTVEKGIYQTSNFRVQPTESIVRFPNITNLCPFGEVFNATRFASVYAWNRKRISNCVADYSVLYNSASFSTFKCYGVSPTKLNDLCFTNVYADSFVIRGDEVRQIAPGQTGKIADYNYKLPDDFTGCVIAWNSNNLDSKVGGNYNYLYRLFRKSNLKPFERDISTEIYQAGSTPCNGVEGFNCYFPLQSYGFQPTTGVGYQPYRVVVLSFELLHAPATVCGPKKSTNLVKNKCVNFNFNGLTGTGVLTESNKKFLPFQQFGRDIADTTDAVRDPQTLEILDITPCSFGGVSVITPGTNTSNQVAVLYQDVNCTEVPVAIHADQLTPTWRVYSTGSNVFQTRAGCLIGAEHVNNSYECDIPIGAGICASYQTQTNSPGSASSVASQSIIAYTMSLGAENSVAYSNNSIAIPTNFTISVTTEILPVSMTKTSVDCTMYICGDSTECSNLLLQYGSFCTQLNRALTGIAVEQDKNTQEVFAQVKQIYKTPPIKDFGGFNFSQILPDPSKPSKRSPIEDLLFNKVTLADAGFIKQYGDCLGDIAARDLICAQKFNGLTVLPPLLTDEMIAQYTSALLAGTITSGWTFGAGPALQIPFPMQMAYRFNGIGVTQNVLYENQKLIANQFNSAIGKIQDSLSSTPSALGKLQDVVNQNAQALNTLVKQLSSNFGAISSVLNDILSRLDPPEAEVQIDRLITGRLQSLQTYVTQQLIRAAEIRASANLAATKMSECVLGQSKRVDFCGKGYHLMSFPQSAPHGVVFLHVTYVPAQEKNFTTAPAICHDGKAHFPREGVFVSNGTHWFVTQRNFYEPQIITTDNTFVSGNCDVVIGIVNNTVYDPLQPELDSFKEELDKYFKNHTSPDVDLGDISGINASVVNIQKEIDRLNEVAKNLNESLIDLQELGKYGSGSGSGSGSGSGSGSGSGSGSGSMGGWSSKPRQGMGTNLSVPNPLGFFPDHQLDPAFGANSNNPDWDFNPNKDQWPEANQVGAGAFGPGFTPPHGGLLGWSPQAQGILTTVPAAPPPASTNRQSGRQPTPISPPLRDSHPQAMQWNSTTFHQALLDPRVRGLYFPAGGSSSGTVNPVPTTASPISSIFSRTGDPAPNMENTTSGFLGPLLVLQAGFFLLTRILTIPQSLDSWWTSLNFLGGAPTCPGQNSQSPTSNHSPTSCPPICPGYRWMCLRRFIIFLFILLLCLIFLLVLLDYQGMLPVCPLLPGTSTTSTGPCKTCTIPAQGTSMFPSCCCTKPSDGNCTCIPIPSSWAFARFLWEWASVRFSWLSLLVPFVQWFVGLSPTVWLSVIWMMWYWGPSLYNILSPFLPLLPIFFCLWVYI

SEQ ID NO: 265 - protein, 1630 aa, synthetic construct
  REGION 1..1630: note = Recombinant Sequence
MFVFFVLLPLVSSQCVNLTTRTQLPPAYTNSFTRGVYYPDKVFRSSVLHSTQDLFLPFFSNVTWFHAIHVSGTNGTKRFDNPVLPFNDGVYFASIEKSNIIRGWIFGTTLDSKTQSLLIVNNATNVVIKVCEFQFCNDPFLGVYYHKNNKSWMESEFRVYSSANNCTFEYVSQPFLMDLEGKQGNFKNLREFVFKNIDGYFKIYSKHTPINLVRDLPQGFSALEPLVDLPIGINITRFQTLLALHRSYLTPGGSSSGWTAGAAAYYVGYLQPRTFLLKYNENGTITDAVDCALDPLSETKCTLKSFTVEKGIYQTSNFRVQPTESIVRFPNITNLCPFGEVFNATRFASVYAWNRKRISNCVADYSVLYNSASFSTFKCYGVSPTKLNDLCFTNVYADSFVIRGDEVRQIAPGQTGKIADYNYKLPDDFTGCVIAWNSNNLDSKVGGNYNYLYRLFRKSNLKPFERDISTEIYQAGSTPCNGVEGFNCYFPLQSYGFQPTNGVGYQPYRVVVLSFELLHAPATVCGPKKSTNLVKNKCVNFNFNGLTGTGVLTESNKKFLPFQQFGRDIADTTDAVRDPQTLEILDITPCSFGGVSVITPGTNTSNQVAVLYQGVNCTEVPVAIHADQLTPTWRVYSTGSNVFQTRAGCLIGAEHVNNSYECDIPIGAGICASYQTQTNSPGSASSVASQSIIAYTMSLGVENSVAYSNNSIAIPTNFTISVTTEILPVSMTKTSVDCTMYICGDSTECSNLLLQYGSFCTQLNRALTGIAVEQDKNTQEVFAQVKQIYKTPPIKDFGGFNFSQILPDPSKPSKRSPIEDLLFNKVTLADAGFIKQYGDCLGDIAARDLICAQKFNGLTVLPPLLTDEMIAQYTSALLAGTITSGWTFGAGPALQIPFPMQMAYRFNGIGVTQNVLYENQKLIANQFNSAIGKIQDSLSSTPSALGKLQDVVNQNAQALNTLVKQLSSNFGAISSVLNDILSRLDPPEAEVQIDRLITGRLQSLQTYVTQQLIRAAEIRASANLAATKMSECVLGQSKRVDFCGKGYHLMSFPQSAPHGVVFLHVTYVPAQEKNFTTAPAICHDGKAHFPREGVFVSNGTHWFVTQRNFYEPQIITTDNTFVSGNCDVVIGIVNNTVYDPLQPELDSFKEELDKYFKNHTSPDVDLGDISGINASVVNIQKEIDRLNEVAKNLNESLIDLQELGKYGSGSGSGSGSGSGSGSGSGSGSGSMGGWSSKPRQGMGTNLSVPNPLGFFPDHQLDPAFGANSNNPDWDFNPNKDQWPEANQVGAGAFGPGFTPPHGGLLGWSPQAQGILTTVPAAPPPASTNRQSGRQPTPISPPLRDSHPQAMQWNSTTFHQALLDPRVRGLYFPAGGSSSGTVNPVPTTASPISSIFSRTGDPAPNMENTTSGFLGPLLVLQAGFFLLTRILTIPQSLDSWWTSLNFLGGAPTCPGQNSQSPTSNHSPTSCPPICPGYRWMCLRRFIIFLFILLLCLIFLLVLLDYQGMLPVCPLLPGTSTTSTGPCKTCTIPAQGTSMFPSCCCTKPSDGNCTCIPIPSSWAFARFLWEWASVRFSWLSLLVPFVQWFVGLSPTVWLSVIWMMWYWGPSLYNILSPFLPLLPIFFCLWVYI

SEQ ID NO: 266 - protein, 1630 aa, synthetic construct
  REGION 1..1630: note = Recombinant Sequence
MFVFLVLLPLVSSQCVNLTTRTQLPPAYTNSFTRGVYYPDKVFRSSVLHSTQDLFLPFFSNVTWFHAIHVSGTNGTKRFDNPVLPFNDGVYFASTEKSNIIRGWIFGTTLDSKTQSLLIVNNATNVVIKVCEFQFCNDPFLSVYYHKNNKSWMESEFRVYSSANNCTFEYVSQPFLMDLVGKQGNFKNLREFVFKNIDGYFKIYSKHTPINLVRDLPQGFSALEPLVDLPIGINITRFQTLLALHRSYLTPGDSSSGWTAGAAAYYVGYLQPRTFLLKYNENGTITDAVDCALDPLSETKCTLKSFTVEKGIYQTSNFRVQPTESIVRFPNITNLCPFGEVFNATRFASVYAWNRKRISNCVADYSVLYNSASFSTFKCYGVSPTKLNDLCFTNVYADSFVIRGDEVRQIAPGQTGKIADYNYKLPDDFTGCVIAWNSNNLDSKVGGNYNYLYRLFRKSNLKPFERDISTEIYQAGSTPCNGVEGFNCYFPLQSYGFQPTNGVGYQPYRVVVLSFELLHAPATVCGPKKSTNLVKNKCVNFNFNGLTGTGVLTESNKKFLPFQQFGRDIADTTDAVRDPQTLEILDITPCSFGGVSVITPGTNTSNQVAVLYQGVNCTEVPVAIHADQLTPTWRVYSTGSNVFQTRAGCLIGAEHVNNSYECDIPIGAGICASYQTHTNSPGSASSVASQSIIAYTMSLGAENSVAYSNNSIAIPTNFTISVTTEILPVSMTKTSVDCTMYICGDSTECSNLLLQYGSFCTQLNRALTGIAVEQDKNTQEVFAQVKQIYKTPPIKDFGGFNFSQILPDPSKPSKRSPIEDLLFNKVTLADAGFIKQYGDCLGDIAARDLICAQKFNGLTVLPPLLTDEMIAQYTSALLAGTITSGWTFGAGPALQIPFPMQMAYRFNGIGVTQNVLYENQKLIANQFNSAIGKIQDSLSSTPSALGKLQDVVNQNAQALNTLVKQLSSNFGAISSVLNDILSRLDPPEAEVQIDRLITGRLQSLQTYVTQQLIRAAEIRASANLAATKMSECVLGQSKRVDFCGKGYHLMSFPQSAPHGVVFLHVTYVPAQEKNFTTAPAICHDGKAHFPREGVFVSNGTHWFVTQRNFYEPQIITTDNTFVSGNCDVVIGIVNNTVYDPLQPELDSFKEELDKYFKNHTSPDVDLGDISGINASVVNIQKEIDRLNEVAKNLNESLIDLQELGKYGSGSGSGSGSGSGSGSGSGSGSGSMGGWSSKPRQGMGTNLSVPNPLGFFPDHQLDPAFGANSNNPDWDFNPNKDQWPEANQVGAGAFGPGFTPPHGGLLGWSPQAQGILTTVPAAPPPASTNRQSGRQPTPISPPLRDSHPQAMQWNSTTFHQALLDPRVRGLYFPAGGSSSGTVNPVPTTASPISSIFSRTGDPAPNMENTTSGFLGPLLVLQAGFFLLTRILTIPQSLDSWWTSLNFLGGAPTCPGQNSQSPTSNHSPTSCPPICPGYRWMCLRRFIIFLFILLLCLIFLLVLLDYQGMLPVCPLLPGTSTTSTGPCKTCTIPAQGTSMFPSCCCTKPSDGNCTCIPIPSSWAFARFLWEWASVRFSWLSLLVPFVQWFVGLSPTVWLSVIWMMWYWGPSLYNILSPFLPLLPIFFCLWVYI

SEQ ID NO: 267 - protein, 1630 aa, synthetic construct
  REGION 1..1630: note = Recombinant Sequence
MFVFLVLLPLVSSQCVNLTTRTQLPPAYTNSFTRGVYYPDKVFRSSVLHSTQDLFLPFFSNVTWFHAIHVSGTNGTKRFDNPVLPFNDGVYFASTEKSNIIRGWIFGTTLDSKTQSLLIVNNATNVVIKVCEFQFCNDPFLGVYYHKNNKSWMESEFRVYSSANNCTFEYVSQPFLMDLEGKQGNFKNLREFVFKNIDGYFKIYSKHTPINLVRDLPQGFSALEPLVDLPIGINITRFQTLLALHRSYLTPGDSSSGWTAGAAAYYVGYLQPRTFLLKYNENGTITDAVDCALDPLSETKCTLKSFTVEKGIYQTSNFRVQPTESIVRFPNITNLCPFGEVFNATRFASVYAWNRKRISNCVADYSVLYNSASFSTFKCYGVSPTKLNDLCFTNVYADSFVIRGDEVRQIAPGQTGKIADYNYKLPDDFTGCVIAWNSNNLDSKVGGNYNYLYRLFRKSNLKPFERDISTEIYQAGSTPCNGVKGFNCYFPLQPYGFQPTYGVGYQPYRVVVLSFELLHAPATVCGPKKSTNLVKNKCVNFNFNGLTGTGVLTESNKKFLPFQQFGRDIADTTDAVRDPQTLEILDITPCSFGGVSVITPGTNTSNQVAVLYQGVNCTEVPVAIHADQLTPTWRVYSTGSNVFQTRAGCLIGAEHVNNSYECDIPIGAGICASYQTQTNSHGSASSVASQSIIAYTMSLGAENSVAYSNNSIAIPTNFTISVTTEILPVSMTKTSVDCTMYICGDSTECSNLLLQYGSFCTQLNRALTGIAVEQDKNTQEVFAQVKQIYKTPPIKDFGGFNFSQILPDPSKPSKRSPIEDLLFNKVTLADAGFIKQYGDCLGDIAARDLICAQKFNGLTVLPPLLTDEMIAQYTSALLAGTITSGWTFGAGPALQIPFPMQMAYRFNGIGVTQNVLYENQKLIANQFNSAIGKIQDSLSSTPSALGKLQDVVNQNAQALNTLVKQLSSNFGAISSVLNDILSRLDPPEAEVQIDRLITGRLQSLQTYVTQQLIRAAEIRASANLAATKMSECVLGQSKRVDFCGKGYHLMSFPQSAPHGVVFLHVTYVPAQEKNFTTAPAICHDGKAHFPREGVFVSNGTHWFVTQRNFYKPQIITTDNTFVSGNCDVVIGIVNNTVYDPLQPELDSFKEELDKYFKNHTSPDVDLGDISGINASVVNIQKEIDRLNEVAKNLNESLIDLQELGKYGSGSGSGSGSGSGSGSGSGSGSGSMGGWSSKPRQGMGTNLSVPNPLGFFPDHQLDPAFGANSNNPDWDFNPNKDQWPEANQVGAGAFGPGFTPPHGGLLGWSPQAQGILTTVPAAPPPASTNRQSGRQPTPISPPLRDSHPQAMQWNSTTFHQALLDPRVRGLYFPAGGSSSGTVNPVPTTASPISSIFSRTGDPAPNMENTTSGFLGPLLVLQAGFFLLTRILTIPQSLDSWWTSLNFLGGAPTCPGQNSQSPTSNHSPTSCPPICPGYRWMCLRRFIIFLFILLLCLIFLLVLLDYQGMLPVCPLLPGTSTTSTGPCKTCTIPAQGTSMFPSCCCTKPSDGNCTCIPIPSSWAFARFLWEWASVRFSWLSLLVPFVQWFVGLSPTVWLSVIWMMWYWGPSLYNILSPFLPLLPIFFCLWVYI

SEQ ID NO: 268 - protein, 1629 aa, synthetic construct
  REGION 1..1629: note = Recombinant Sequence
MFVFLVLLPLVSSQCVNLTTRTQLPPAYTNSFTRGVYYPDKVFRSSVLHSTQDLFLPFFSNVTWFDAIHVSGTNGTKRFDNPVLPFNDGVYFASTEKSNIIRGWIFGTTLDSKTQSLLIVNNATNVVIKVCEFQFCNDPFLVVYHKNNKSWMESEFRVYSSANNCTFEYVSQPFLMDLEGKQGNFKNLREFVFKNIDGYFKIYSKHTPINLVRGLPQGFSALEPLVDLPIGINITRFQTLLALHRSYLTPGDSSSGWTAGAAAYYVGYLQPRTFLLKYNENGTITDAVDCALDPLSETKCTLKSFTVEKGIYQTSNFRVQPTESIVRFPNITNLCPFGEVFNATRFASVYAWNRKRISNCVADYSVLYNSASFSTFKCYGVSPTKLNDLCFTNVYADSFVIRGDEVRQIAPGQTGKIADYNYKLPDDFTGCVIAWNSNNLDSKVGGNYNYLYRLFRKSNLKPFERDISTEIYQAGSTPCNGAEGFNCYFPLQSYGFQPTNGVGYQPYRVVVLSFELLHAPATVCGPKKSTNLVKNKCVNFNFNGLTGTGVLTESNKKFLPFQQFGRDIADTTDAVRDPQTLEILDITPCSFGGVSVITPGTNTSNQVAVLYQDVNCTEVPVAIHADQLTPTWRVYSTGSNVFQTRAGCLIGAEYVNNSYECDIPIGASICASYQTQTNSPGSASSVASQSIIAYTMSLGAENSVAYSNNSIAIPTNFTISVTTEILPVSMTKTSVDCTMYICGDSTECSNLLLQYGSFCTQLNRALTGIAVEQDKNTQEVFAQVKQIYKTPPIKDFGGFNFSQILPDPSKPSKRSPIEDLLFNKVTLADAGFIKQYGDCLGDIAARDLICAQKFNGLTVLPPLLTDEMIAQYTSALLAGTITSGWTFGAGPALQIPFPMQMAYRFNGIGVTQNVLYENQKLIANQFNSAIGKIQDSLSSTPSALGKLRDVVNQNAQALNTLVKQLSSNFGAISSVLNDILSRLDPPEAEVQIDRLITGRLQSLQTYVTQQLIRAAEIRASANLAATKMSECVLGQSKRVDFCGKGYHLMSFPQSAPHGVVFLHVTYVPAQEKNFTTAPAICHDGKDHFPREGVFVSNGTHWFVTQRNFYEPQIITTDNTFVSGNCDVVIGIVNNTVYDPLQPELDSFKEELDKYFKNHTSPDVDLGDISGINASVVNIQKEIDRLNEVAKNLNESLIDLQELGKYGSGSGSGSGSGSGSGSGSGSGSGSMGGWSSKPRQGMGTNLSVPNPLGFFPDHQLDPAFGANSNNPDWDFNPNKDQWPEANQVGAGAFGPGFTPPHGGLLGWSPQAQGILTTVPAAPPPASTNRQSGRQPTPISPPLRDSHPQAMQWNSTTFHQALLDPRVRGLYFPAGGSSSGTVNPVPTTASPISSIFSRTGDPAPNMENTTSGFLGPLLVLQAGFFLLTRILTIPQSLDSWWTSLNFLGGAPTCPGQNSQSPTSNHSPTSCPPICPGYRWMCLRRFIIFLFILLLCLIFLLVLLDYQGMLPVCPLLPGTSTTSTGPCKTCTIPAQGTSMFPSCCCTKPSDGNCTCIPIPSSWAFARFLWEWASVRFSWLSLLVPFVQWFVGLSPTVWLSVIWMMWYWGPSLYNILSPFLPLLPIFFCLWVYI

SEQ ID NO: 269 - protein, 1630 aa, synthetic construct
  REGION 1..1630: note = Recombinant Sequence
MFVFLVLLPLVSSQCVNLTTRTQLPPAYTNSFTRGVYYPDKVFRSSVLHSTQDLFLPFFSNVTWFHAIHVSGTNGTKRFDNPVLPFNDGVYFASTEKSNIIRGWIFGTTLDSKTQSLLIVNNATNVVIKVCEFQFCNDPFLGVYYHKNNKSWMESEFRVYSSANNCTFEYVSQPFLMDLEGKQGNFKNLREFVFKNIDGYFKIYSKHTPINLVRDLPQGFSALEPLVDLPIGINITRFQTLLALHRSYLTPGDSSSGWTAGAAAYYVGYLQPRTFLLKYNENGTITDAVDCALDPLSETKCTLKSFTVEKGIYQTSNFRVQPTESIVRFPNITNLCPFGEVFNATRFASVYAWNRKRISNCVADYSVLYNSASFSTFKCYGVSPTKLNDLCFTNVYADSFVIRGDEVRQIAPGQTGKIADYNYKLPDDFTGCVIAWNSNNLDSKVGGNYNYLYRLFRKSNLKPFERDISTEIYQAGSTPCNGVEGFNCYFPLQPYGFQPTNGVGYQPYRVVVLSFELLHAPATVCGPKKSTNLVKNKCVNFNFNGLTGTGVLTESNKKFLPFQQFGRDIADTTDAVRDPQTLEILDITPCSFGGVSVITPGTNTSNQVAVLYQGVNCTEVPVAIHADQLTPTWRVYSTGSNVFQTRAGCLIGAEHVNNSYECDIPIGAGICASYQTQTNSHGSASSVASQSIIAYTMSLGAENSVAYSNNSIAIPINFTISVTTEILPVSMTKTSVDCTMYICGDSTECSNLLLQYGSFCTQLNRALTGIAVEQDKNTQEVFAQVKQIYKTPPIKDFGGFNFSQILPDPSKPSKRSPIEDLLFNKVTLADAGFIKQYGDCLGDIAARDLICAQKFNGLTVLPPLLTDEMIAQYTSALLAGTITSGWTFGAGPALQIPFPMQMAYRFNGIGVTQNVLYENQKLIANQFNSAIGKIQDSLSSTPSALGKLQDVVNQNAQALNTLVKQLSSNFGAISSVLNDILSRLDPPEAEVQIDRLITGRLQSLQTYVTQQLIRAAEIRASANLAATKMSECVLGQSKRVDFCGKGYHLMSFPQSAPHGVVFLHVTYVPAQEKNFTTAPAICHDGKAHFPREGVFVSNGTHWFVTQRNFYEPQIITTDNTFVSGNCDVVIGIVNNTVYDPLQPELDSFKEELDKYFKNHTSPDVDLGDISGINASVVNIQKEIDRLNEVAKNLNESLIDLQELGKYGSGSGSGSGSGSGSGSGSGSGSGSMGGWSSKPRQGMGTNLSVPNPLGFFPDHQLDPAFGANSNNPDWDFNPNKDQWPEANQVGAGAFGPGFTPPHGGLLGWSPQAQGILTTVPAAPPPASTNRQSGRQPTPISPPLRDSHPQAMQWNSTTFHQALLDPRVRGLYFPAGGSSSGTVNPVPTTASPISSIFSRTGDPAPNMENTTSGFLGPLLVLQAGFFLLTRILTIPQSLDSWWTSLNFLGGAPTCPGQNSQSPTSNHSPTSCPPICPGYRWMCLRRFIIFLFILLLCLIFLLVLLDYQGMLPVCPLLPGTSTTSTGPCKTCTIPAQGTSMFPSCCCTKPSDGNCTCIPIPSSWAFARFLWEWASVRFSWLSLLVPFVQWFVGLSPTVWLSVIWMMWYWGPSLYNILSPFLPLLPIFFCLWVYI

SEQ ID NO: 270 - protein, 1638 aa, synthetic construct
  REGION 1..1638: note = Recombinant Sequence
MFVFLVLLPLVSSQCVNLTTRTQLPPAYTNSFTRGVYYPDKVFRSSVLHSTQDLFLPFFSNVTWFHAIHVSGTNGTKRFDNPVLPFNDGVYFASTEKSNIIRGWIFGTTLDSKTQSLLIVNNATNVVIKVCEFQFCNDPFLGVYYHKNNKSWMESEFRVYSSANNCTFEYVSQPFLMDLEGKQGNFKNLREFVFKNIDGYFKIYSKHTPINLVRDLPQGFSALEPLVDLPIGINITRFQTLLALHRSYLTPGDSSSGWTAGAAAYYVGYLQPRTFLLKYNENGTITDAVDCALDPLSETKCTLKSFTVEKGIYQTSNFRVQPTESIVRFPNITNLCPFGEVFNATRFASVYAWNRKRISNCVADYSVLYNSASFSTFKCYGVSPTKLNDLCFTNVYADSFVIRGDEVRQIAPGQTGKIADYNYKLPDDFTGCVIAWNSNNLDSKVGGNYNYLYRLFRKSNLKPFERDISTEIYQAGSTPCNGVEGFNCYFPLQSYGFQPTNGVGYQPYRVVVLSFELLHAPATVCGPKKSTNLVKNKCVNFNFNGLTGTGVLTESNKKFLPFQQFGRDIADTTDAVRDPQTLEILDITPCSFGGVSVITPGTNTSNQVAVLYQDVNCTEVPVAIHADQLTPTWRVYSTGSNVFQTRAGCLIGAEHVNNSYECDIPIGAGICASYQTQTNSPGSASSVASQSIIAYTMSLGAENSVAYSNNSIAIPTNFTISVTTEILPVSMTKTSVDCTMYICGDSTECSNLLLQYGSFCTQLNRALTGIAVEQDKNTQEVFAQVKQIYKTPPIKDFGGFNFSQILPDPSKPSKRSPIEDLLFNKVTLADAGFIKQYGDCLGDIAARDLICAQKFNGLTVLPPLLTDEMIAQYTSALLAGTITSGWTFGAGPALQIPFPMQMAYRFNGIGVTQNVLYENQKLIANQFNSAIGKIQDSLSSTPSALGKLQDVVNQNAQALNTLVKQLSSNFGAISSVLNDILSRLDPPEAEVQIDRLITGRLQSLQTYVTQQLIRAAEIRASANLAATKMSECVLGQSKRVDFCGKGYHLMSFPQSAPHGVVFLHVTYVPAQEKNFTTAPAICHDGKAHFPREGVFVSNGTHWFVTQRNFYEPQIITTDNTFVSGNCDVVIGIVNNTVYDPLQPELDSFKEELDKYFKNHTSPDVDLGDISGINASVVNIQKEIDRLNEVAKNLNESLIDLQELGKYGSGSGSGSGSGSGSGSGSGSGSGSGSGSGSGSMGGWSSKPRQGMGTNLSVPNPLGFFPDHQLDPAFGANSNNPDWDFNPNKDQWPEANQVGAGAFGPGFTPPHGGLLGWSPQAQGILTTVPAAPPPASTNRQSGRQPTPISPPLRDSHPQAMQWNSTTFHQALLDPRVRGLYFPAGGSSSGTVNPVPTTASPISSIFSRTGDPAPNMENTTSGFLGPLLVLQAGFFLLTRILTIPQSLDSWWTSLNFLGGAPTCPGQNSQSPTSNHSPTSCPPICPGYRWMCLRRFIIFLFILLLCLIFLLVLLDYQGMLPVCPLLPGTSTTSTGPCKTCTIPAQGTSMFPSCCCTKPSDGNCTCIPIPSSWAFARFLWEWASVRFSWLSLLVPFVQWFVGLSPTVWLSVIWMMWYWGPSLYNILSPFLPLLPIFFCLWVYI

SEQ ID NO: 271 - protein, 1636 aa, synthetic construct
  REGION 1..1636: note = Recombinant Sequence
MFVFLVLLPLVSSQCVNLRTRTQLPPAYTNSFTRGVYYPDKVFRSSVLHSTQDLFLPFFSNVTWFHAIHVSGTNGTKRFDNPVLPFNDGVYFASTEKSNIIRGWIFGTTLDSKTQSLLIVNNATNVVIKVCEFQFCNDPFLDVYYHKNNKSWMESGVYSSANNCTFEYVSQPFLMDLEGKQGNFKNLREFVFKNIDGYFKIYSKHTPINLVRDLPQGFSALEPLVDLPIGINITRFQTLLALHRSYLTPGDSSSGWTAGAAAYYVGYLQPRTFLLKYNENGTITDAVDCALDPLSETKCTLKSFTVEKGIYQTSNFRVQPTESIVRFPNITNLCPFGEVFNATRFASVYAWNRKRISNCVADYSVLYNSASFSTFKCYGVSPTKLNDLCFTNVYADSFVIRGDEVRQIAPGQTGKIADYNYKLPDDFTGCVIAWNSNNLDSKVGGNYNYRYRLFRKSNLKPFERDISTEIYQAGSKPCNGVEGFNCYFPLQSYGFQPTNGVGYQPYRVVVLSFELLHAPATVCGPKKSTNLVKNKCVNFNFNGLTGTGVLTESNKKFLPFQQFGRDIADTTDAVRDPQTLEILDITPCSFGGVSVITPGTNTSNQVAVLYQGVNCTEVPVAIHADQLTPTWRVYSTGSNVFQTRAGCLIGAEHVNNSYECDIPIGAGICASYQTQTNSRGSASSVASQSIIAYTMSLGAENSVAYSNNSIAIPTNFTISVTTEILPVSMTKTSVDCTMYICGDSTECSNLLLQYGSFCTQLNRALTGIAVEQDKNTQEVFAQVKQIYKTPPIKDFGGFNFSQILPDPSKPSKRSPIEDLLFNKVTLADAGFIKQYGDCLGDIAARDLICAQKFNGLTVLPPLLTDEMIAQYTSALLAGTITSGWTFGAGPALQIPFPMQMAYRFNGIGVTQNVLYENQKLIANQFNSAIGKIQDSLSSTPSALGKLQNVVNQNAQALNTLVKQLSSNFGAISSVLNDILSRLDPPEAEVQIDRLITGRLQSLQTYVTQQLIRAAEIRASANLAATKMSECVLGQSKRVDFCGKGYHLMSFPQSAPHGVVFLHVTYVPAQEKNFTTAPAICHDGKAHFPREGVFVSNGTHWFVTQRNFYEPQIITTDNTFVSGNCDVVIGIVNNTVYDPLQPELDSFKEELDKYFKNHTSPDVDLGDISGINASVVNIQKEIDRLNEVAKNLNESLIDLQELGKYGSGSGSGSGSGSGSGSGSGSGSGSGSGSGSGSMGGWSSKPRQGMGTNLSVPNPLGFFPDHQLDPAFGANSNNPDWDFNPNKDQWPEANQVGAGAFGPGFTPPHGGLLGWSPQAQGILTTVPAAPPPASTNRQSGRQPTPISPPLRDSHPQAMQWNSTTFHQALLDPRVRGLYFPAGGSSSGTVNPVPTTASPISSIFSRTGDPAPNMENTTSGFLGPLLVLQAGFFLLTRILTIPQSLDSWWTSLNFLGGAPTCPGQNSQSPTSNHSPTSCPPICPGYRWMCLRRFIIFLFILLLCLIFLLVLLDYQGMLPVCPLLPGTSTTSTGPCKTCTIPAQGTSMFPSCCCTKPSDGNCTCIPIPSSWAFARFLWEWASVRFSWLSLLVPFVQWFVGLSPTVWLSVIWMMWYWGPSLYNILSPFLPLLPIFFCLWVYI

SEQ ID NO: 272 - protein, 1636 aa, synthetic construct
  REGION 1..1636: note = Recombinant Sequence
MFVFLVLLPLVSSQCVNLRTRTQLPPAYTNSFTRGVYYPDKVFRSSVLHSTQDLFLPFFSNVTWFHAIHFSGTNGTKRFDNPVLPFNDGVYFASIEKSNIIRGWIFGTTLDSKTQSLLIVNNATNVVIKVCEFQFCNDPFLDVYYHKNNKSWMESGVYSSANNCTFEYVSQPFLMDLEGKQGNFKNLREFVFKNIDGYFKIYSKHTPINLVRDLPQGFSVLEPLVDLPIGINITRFQTLLALHRSYLTPGDSSSGLTAGAAAYYVGYLQPRTFLLKYNENGTITDAVDCALDPLSETKCTLKSFTVEKGIYQTSNFRVQPTESIVRFPNITNLCPFGEVFNATRFASVYAWNRKRISNCVADYSVLYNSASFSTFKCYGVSPTKLNDLCFTNVYADSFVIRGDEVRQIAPGQTGNIADYNYKLPDDFTGCVIAWNSNNLDSKVGGNYNYRYRLFRKSNLKPFERDISTEIYQAGSKPCNGVEGFNCYFPLQSYGFQPTNGVGYQPYRVVVLSFELLHAPATVCGPKKSTNLVKNKCVNFNFNGLTGTGVLTESNKKFLPFQQFGRDIADTTDAVRDPQTLEILDITPCSFGGVSVITPGTNTSNQVAVLYQGVNCTEVPVAIHADQLTPTWRVYSTGSNVFQTRAGCLIGAEHVNNSYECDIPIGAGICASYQTQTNSRGSASSVASQSIIAYTMSLGAENSVAYSNNSIAIPTNFTISVTTEILPVSMTKTSVDCTMYICGDSTECSNLLLQYGSFCTQLNRALTGIAVEQDKNTQEVFAQVKQIYKTPPIKDFGGFNFSQILPDPSKPSKRSPIEDLLFNKVTLADAGFIKQYGDCLGDIAARDLICAQKFNGLTVLPPLLTDEMIAQYTSALLAGTITSGWTFGAGPALQIPFPMQMAYRFNGIGVTQNVLYENQKLIANQFNSAIGKIQDSLSSTPSALGKLQNVVNQNAQALNTLVKQLSSNFGAISSVLNDILSRLDPPEAEVQIDRLITGRLQSLQTYVTQQLIRAAEIRASANLAATKMSECVLGQSKRVDFCGKGYHLMSFPQSAPHGVVFLHVTYVPAQEKNFTTAPAICHDGKAHFPREGVFVSNGTHWFVTQRNFYEPQIITTDNTFVSGNCDVVIGIVNNTVYDPLQPELDSFKEELDKYFKNHTSPDVDLGDISGINASVVNIQKEIDRLNEVAKNLNESLIDLQELGKYGSGSGSGSGSGSGSGSGSGSGSGSGSGSGSGSMGGWSSKPRQGMGTNLSVPNPLGFFPDHQLDPAFGANSNNPDWDFNPNKDQWPEANQVGAGAFGPGFTPPHGGLLGWSPQAQGILTTVPAAPPPASTNRQSGRQPTPISPPLRDSHPQAMQWNSTTFHQALLDPRVRGLYFPAGGSSSGTVNPVPTTASPISSIFSRTGDPAPNMENTTSGFLGPLLVLQAGFFLLTRILTIPQSLDSWWTSLNFLGGAPTCPGQNSQSPTSNHSPTSCPPICPGYRWMCLRRFIIFLFILLLCLIFLLVLLDYQGMLPVCPLLPGTSTTSTGPCKTCTIPAQGTSMFPSCCCTKPSDGNCTCIPIPSSWAFARFLWEWASVRFSWLSLLVPFVQWFVGLSPTVWLSVIWMMWYWGPSLYNILSPFLPLLPIFFCLWVYI

SEQ ID NO: 273 - protein, 1635 aa, synthetic construct
  REGION 1..1635: note = Recombinant Sequence
MFVFLVLLPLVSSQCVNLTTRTQLPPAYTNSFTRGVYYPDKVFRSSVLHSTQDLFLPFFSNVTWFHAISGTNGTKRFDNPVLPFNDGVYFASTEKSNIIRGWIFGTTLDSKTQSLLIVNNATNVVIKVCEFQFCNDPFLGVYHKNNKSWMESEFRVYSSANNCTFEYVSQPFLMDLEGKQGNFKNLREFVFKNIDGYFKIYSKHTPINLVRDLPQGFSALEPLVDLPIGINITRFQTLLALHRSYLTPGDSSSGWTAGAAAYYVGYLQPRTFLLKYNENGTITDAVDCALDPLSETKCTLKSFTVEKGIYQTSNFRVQPTESIVRFPNITNLCPFGEVFNATRFASVYAWNRKRISNCVADYSVLYNSASFSTFKCYGVSPTKLNDLCFTNVYADSFVIRGDEVRQIAPGQTGKIADYNYKLPDDFTGCVIAWNSNNLDSKVGGNYNYLYRLFRKSNLKPFERDISTEIYQAGSTPCNGVEGFNCYFPLQSYGFQPTYGVGYQPYRVVVLSFELLHAPATVCGPKKSTNLVKNKCVNFNFNGLTGTGVLTESNKKFLPFQQFGRDIDDTTDAVRDPQTLEILDITPCSFGGVSVITPGTNTSNQVAVLYQGVNCTEVPVAIHADQLTPTWRVYSTGSNVFQTRAGCLIGAEHVNNSYECDIPIGAGICASYQTQTNSHGSASSVASQSIIAYTMSLGAENSVAYSNNSIAIPINFTISVTTEILPVSMTKTSVDCTMYICGDSTECSNLLLQYGSFCTQLNRALTGIAVEQDKNTQEVFAQVKQIYKTPPIKDFGGFNFSQILPDPSKPSKRSPIEDLLFNKVTLADAGFIKQYGDCLGDIAARDLICAQKFNGLTVLPPLLTDEMIAQYTSALLAGTITSGWTFGAGPALQIPFPMQMAYRFNGIGVTQNVLYENQKLIANQFNSAIGKIQDSLSSTPSALGKLQDVVNQNAQALNTLVKQLSSNFGAISSVLNDILARLDPPEAEVQIDRLITGRLQSLQTYVTQQLIRAAEIRASANLAATKMSECVLGQSKRVDFCGKGYHLMSFPQSAPHGVVFLHVTYVPAQEKNFTTAPAICHDGKAHFPREGVFVSNGTHWFVTQRNFYEPQIITTHNTFVSGNCDVVIGIVNNTVYDPLQPELDSFKEELDKYFKNHTSPDVDLGDISGINASVVNIQKEIDRLNEVAKNLNESLIDLQELGKYGSGSGSGSGSGSGSGSGSGSGSGSGSGSGSGSMGGWSSKPRQGMGTNLSVPNPLGFFPDHQLDPAFGANSNNPDWDFNPNKDQWPEANQVGAGAFGPGFTPPHGGLLGWSPQAQGILTTVPAAPPPASTNRQSGRQPTPISPPLRDSHPQAMQWNSTTFHQALLDPRVRGLYFPAGGSSSGTVNPVPTTASPISSIFSRTGDPAPNMENTTSGFLGPLLVLQAGFFLLTRILTIPQSLDSWWTSLNFLGGAPTCPGQNSQSPTSNHSPTSCPPICPGYRWMCLRRFIIFLFILLLCLIFLLVLLDYQGMLPVCPLLPGTSTTSTGPCKTCTIPAQGTSMFPSCCCTKPSDGNCTCIPIPSSWAFARFLWEWASVRFSWLSLLVPFVQWFVGLSPTVWLSVIWMMWYWGPSLYNILSPFLPLLPIFFCLWVYI

SEQ ID NO: 274 - protein, 1635 aa, synthetic construct
  REGION 1..1635: note = Recombinant Sequence
MFVFLVLLPLVSSQCVNLTTRTQLPPAYTNSFTRGVYYPDKVFRSSVLHSTQDLFLPFFSNVTWFHAISGTNGTKRFDNPVLPFNDGVYFASTEKSNIIRGWIFGTTLDSKTQSLLIVNNATNVVIKVCEFQFCNDPFLGVYHKNNKSWMESEFRVYSSANNCTFEYVSQPFLMDLEGKQGNFKNLREFVFKNIDGYFKIYSKHTPINLVRDLPQGFSALEPLVDLPIGINITRFQTLLALHRSYLTPGDSSSGWTAGAAAYYVGYLQPRTFLLKYNENGTITDAVDCALDPLSETKCTLKSFTVEKGIYQTSNFRVQPTESIVRFPNITNLCPFGEVFNATRFASVYAWNRKRISNCVADYSVLYNSASFSTFKCYGVSPTKLNDLCFTNVYADSFVIRGDEVRQIAPGQTGKIADYNYKLPDDFTGCVIAWNSNNLDSKVGGNYNYLYRLFRKSNLKPFERDISTEIYQAGSTPCNGVKGFNCYFPLQPYGFQPTYGVGYQPYRVVVLSFELLHAPATVCGPKKSTNLVKNKCVNFNFNGLTGTGVLTESNKKFLPFQQFGRDIDDTTDAVRDPQTLEILDITPCSFGGVSVITPGTNTSNQVAVLYQGVNCTEVPVAIHADQLTPTWRVYSTGSNVFQTRAGCLIGAEHVNNSYECDIPIGAGICASYQTQTNSHGSASSVASQSIIAYTMSLGAENSVAYSNNSIAIPINFTISVTTEILPVSMTKTSVDCTMYICGDSTECSNLLLQYGSFCTQLNRALTGIAVEQDKNTQEVFAQVKQIYKTPPIKDFGGFNFSQILPDPSKPSKRSPIEDLLFNKVTLADAGFIKQYGDCLGDIAARDLICAQKFNGLTVLPPLLTDEMIAQYTSALLAGTITSGWTFGAGPALQIPFPMQMAYRFNGIGVTQNVLYENQKLIANQFNSAIGKIQDSLSSTPSALGKLQDVVNQNAQALNTLVKQLSSNFGAISSVLNDILARLDPPEAEVQIDRLITGRLQSLQTYVTQQLIRAAEIRASANLAATKMSECVLGQSKRVDFCGKGYHLMSFPQSAPHGVVFLHVTYVPAQEKNFTTAPAICHDGKAHFPREGVFVSNGTHWFVTQRNFYEPQIITTHNTFVSGNCDVVIGIVNNTVYDPLQPELDSFKEELDKYFKNHTSPDVDLGDISGINASVVNIQKEIDRLNEVANNLNESLIDLQELGKYGSGSGSGSGSGSGSGSGSGSGSGSGSGSGSGSMGGWSSKPRQGMGTNLSVPNPLGFFPDHQLDPAFGANSNNPDWDFNPNKDQWPEANQVGAGAFGPGFTPPHGGLLGWSPQAQGILTTVPAAPPPASTNRQSGRQPTPISPPLRDSHPQAMQWNSTTFHQALLDPRVRGLYFPAGGSSSGTVNPVPTTASPISSIFSRTGDPAPNMENTTSGFLGPLLVLQAGFFLLTRILTIPQSLDSWWTSLNFLGGAPTCPGQNSQSPTSNHSPTSCPPICPGYRWMCLRRFIIFLFILLLCLIFLLVLLDYQGMLPVCPLLPGTSTTSTGPCKTCTIPAQGTSMFPSCCCTKPSDGNCTCIPIPSSWAFARFLWEWASVRFSWLSLLVPFVQWFVGLSPTVWLSVIWMMWYWGPSLYNILSPFLPLLPIFFCLWVYI

SEQ ID NO: 275 - protein, 1635 aa, synthetic construct
  REGION 1..1635: note = Recombinant Sequence
MFVFLVLLPLVSSQCVNFTTRTQLPPAYTNSFTRGVYYPDKVFRSSVLHSTQDLFLPFFSNVTWFHAIHVSGTNGTKRFANPVLPFNDGVYFASTEKSNIIRGWIFGTTLDSKTQSLLIVNNATNVVIKVCEFQFCNDPFLGVYYHKNNKSWMESEFRVYSSANNCTFEYVSQPFLMDLEGKQGNFKNLREFVFKNIDGYFKIYSKHTPINLVRGLPQGFSALEPLVDLPIGINITRFQTLHRSYLTPGDSSSGWTAGAAAYYVGYLQPRTFLLKYNENGTITDAVDCALDPLSETKCTLKSFTVEKGIYQTSNFRVQPTESIVRFPNITNLCPFGEVFNATRFASVYAWNRKRISNCVADYSVLYNSASFSTFKCYGVSPTKLNDLCFTNVYADSFVIRGDEVRQIAPGQTGNIADYNYKLPDDFTGCVIAWNSNNLDSKVGGNYNYLYRLFRKSNLKPFERDISTEIYQAGSTPCNGVKGFNCYFPLQSYGFQPTYGVGYQPYRVVVLSFELLHAPATVCGPKKSTNLVKNKCVNFNFNGLTGTGVLTESNKKFLPFQQFGRDIADTTDAVRDPQTLEILDITPCSFGGVSVITPGTNTSNQVAVLYQGVNCTEVPVAIHADQLTPTWRVYSTGSNVFQTRAGCLIGAEHVNNSYECDIPIGAGICASYQTQTNSPGSASSVASQSIIAYTMSLGVENSVAYSNNSIAIPTNFTISVTTEILPVSMTKTSVDCTMYICGDSTECSNLLLQYGSFCTQLNRALTGIAVEQDKNTQEVFAQVKQIYKTPPIKDFGGFNFSQILPDPSKPSKRSPIEDLLFNKVTLADAGFIKQYGDCLGDIAARDLICAQKFNGLTVLPPLLTDEMIAQYTSALLAGTITSGWTFGAGPALQIPFPMQMAYRFNGIGVTQNVLYENQKLIANQFNSAIGKIQDSLSSTPSALGKLQDVVNQNAQALNTLVKQLSSNFGAISSVLNDILSRLDPPEAEVQIDRLITGRLQSLQTYVTQQLIRAAEIRASANLAATKMSECVLGQSKRVDFCGKGYHLMSFPQSAPHGVVFLHVTYVPAQEKNFTTAPAICHDGKAHFPREGVFVSNGTHWFVTQRNFYEPQIITTDNTFVSGNCDVVIGIVNNTVYDPLQPELDSFKEELDKYFKNHTSPDVDLGDISGINASVVNIQKEIDRLNEVAKNLNESLIDLQELGKYGSGSGSGSGSGSGSGSGSGSGSGSGSGSGSGSMGGWSSKPRQGMGTNLSVPNPLGFFPDHQLDPAFGANSNNPDWDFNPNKDQWPEANQVGAGAFGPGFTPPHGGLLGWSPQAQGILTTVPAAPPPASTNRQSGRQPTPISPPLRDSHPQAMQWNSTTFHQALLDPRVRGLYFPAGGSSSGTVNPVPTTASPISSIFSRTGDPAPNMENTTSGFLGPLLVLQAGFFLLTRILTIPQSLDSWWTSLNFLGGAPTCPGQNSQSPTSNHSPTSCPPICPGYRWMCLRRFIIFLFILLLCLIFLLVLLDYQGMLPVCPLLPGTSTTSTGPCKTCTIPAQGTSMFPSCCCTKPSDGNCTCIPIPSSWAFARFLWEWASVRFSWLSLLVPFVQWFVGLSPTVWLSVIWMMWYWGPSLYNILSPFLPLLPIFFCLWVYI

SEQ ID NO: 276 - protein, 1638 aa, synthetic construct
  REGION 1..1638: note = Recombinant Sequence
MFVFLVLLPLVSSQCVNFTNRTQLPSAYTNSFTRGVYYPDKVFRSSVLHSTQDLFLPFFSNVTWFHAIHVSGTNGTKRFDNPVLPFNDGVYFASTEKSNIIRGWIFGTTLDSKTQSLLIVNNATNVVIKVCEFQFCNYPFLGVYYHKNNKSWMESEFRVYSSANNCTFEYVSQPFLMDLEGKQGNFKNLSEFVFKNIDGYFKIYSKHTPINLVRDLPQGFSALEPLVDLPIGINITRFQTLLALHRSYLTPGDSSSGWTAGAAAYYVGYLQPRTFLLKYNENGTITDAVDCALDPLSETKCTLKSFTVEKGIYQTSNFRVQPTESIVRFPNITNLCPFGEVFNATRFASVYAWNRKRISNCVADYSVLYNSASFSTFKCYGVSPTKLNDLCFTNVYADSFVIRGDEVRQIAPGQTGTIADYNYKLPDDFTGCVIAWNSNNLDSKVGGNYNYLYRLFRKSNLKPFERDISTEIYQAGSTPCNGVKGFNCYFPLQSYGFQPTYGVGYQPYRVVVLSFELLHAPATVCGPKKSTNLVKNKCVNFNFNGLTGTGVLTESNKKFLPFQQFGRDIADTTDAVRDPQTLEILDITPCSFGGVSVITPGTNTSNQVAVLYQGVNCTEVPVAIHADQLTPTWRVYSTGSNVFQTRAGCLIGAEYVNNSYECDIPIGAGICASYQTQTNSPGSASSVASQSIIAYTMSLGAENSVAYSNNSIAIPTNFTISVTTEILPVSMTKTSVDCTMYICGDSTECSNLLLQYGSFCTQLNRALTGIAVEQDKNTQEVFAQVKQIYKTPPIKDFGGFNFSQILPDPSKPSKRSPIEDLLFNKVTLADAGFIKQYGDCLGDIAARDLICAQKFNGLTVLPPLLTDEMIAQYTSALLAGTITSGWTFGAGPALQIPFPMQMAYRFNGIGVTQNVLYENQKLIANQFNSAIGKIQDSLSSTPSALGKLQDVVNQNAQALNTLVKQLSSNFGAISSVLNDILSRLDPPEAEVQIDRLITGRLQSLQTYVTQQLIRAAEIRASANLAAIKMSECVLGQSKRVDFCGKGYHLMSFPQSAPHGVVFLHVTYVPAQEKNFTTAPAICHDGKAHFPREGVFVSNGTHWFVTQRNFYEPQIITTDNTFVSGNCDVVIGIVNNTVYDPLQPELDSFKEELDKYFKNHTSPDVDLGDISGINASFVNIQKEIDRLNEVAKNLNESLIDLQELGKYGSGSGSGSGSGSGSGSGSGSGSGSGSGSGSGSMGGWSSKPRQGMGTNLSVPNPLGFFPDHQLDPAFGANSNNPDWDFNPNKDQWPEANQVGAGAFGPGFTPPHGGLLGWSPQAQGILTTVPAAPPPASTNRQSGRQPTPISPPLRDSHPQAMQWNSTTFHQALLDPRVRGLYFPAGGSSSGTVNPVPTTASPISSIFSRTGDPAPNMENTTSGFLGPLLVLQAGFFLLTRILTIPQSLDSWWTSLNFLGGAPTCPGQNSQSPTSNHSPTSCPPICPGYRWMCLRRFIIFLFILLLCLIFLLVLLDYQGMLPVCPLLPGTSTTSTGPCKTCTIPAQGTSMFPSCCCTKPSDGNCTCIPIPSSWAFARFLWEWASVRFSWLSLLVPFVQWFVGLSPTVWLSVIWMMWYWGPSLYNILSPFLPLLPIFFCLWVYI

SEQ ID NO: 277 - protein, 1638 aa, synthetic construct
  REGION 1..1638: note = Recombinant Sequence
MFVFLVLLPLVSSQCVNLTTRTQLPPAYTNSFTRGVYYPDKVFRSSVLHSTQDLFLPFFSNVTWFHAIHVSGTNGTKRFDNPVLPFNDGVYFASIEKSNIIRGWIFGTTLDSKTQSLLIVNNATNVVIKVCEFQFCNDPFLDVYYHKNNKSWMKSEFRVYSSANNCTFEYVSQPFLMDLEGKQGNFKNLREFVFKNIDGYFKIYSKHTPINLVRDLPQGFSALEPLVDLPIGINITRFQTLLALHRSYLTPGDSSSGWTAGAAAYYVGYLQPRTFLLKYNENGTITDAVDCALDPLSETKCTLKSFTVEKGIYQTSNFRVQPTESIVRFPNITNLCPFGEVFNATRFASVYAWNRKRISNCVADYSVLYNSASFSTFKCYGVSPTKLNDLCFTNVYADSFVIRGDEVRQIAPGQTGKIADYNYKLPDDFTGCVIAWNSNNLDSKVGGNYNYRYRLFRKSNLKPFERDISTEIYQAGSTPCNGVQGFNCYFPLQSYGFQPTNGVGYQPYRVVVLSFELLHAPATVCGPKKSTNLVKNKCVNFNFNGLTGTGVLTESNKKFLPFQQFGRDIADTTDAVRDPQTLEILDITPCSFGGVSVITPGTNTSNQVAVLYQGVNCTEVPVAIHADQLTPTWRVYSTGSNVFQTRAGCLIGAEHVNNSYECDIPIGAGICASYQTQTNSRGSASSVASQSIIAYTMSLGAENSVAYSNNSIAIPTNFTISVTTEILPVSMTKTSVDCTMYICGDSTECSNLLLQYGSFCTQLNRALTGIAVEQDKNTQEVFAQVKQIYKTPPIKDFGGFNFSQILPDPSKPSKRSPIEDLLFNKVTLADAGFIKQYGDCLGDIAARDLICAQKFNGLTVLPPLLTDEMIAQYTSALLAGTITSGWTFGAGPALQIPFPMQMAYRFNGIGVTQNVLYENQKLIANQFNSAIGKIQDSLSSTPSALGKLQDVVNQNAQALNTLVKQLSSNFGAISSVLNDILSRLDPPEAEVQIDRLITGRLQSLQTYVTQQLIRAAEIRASANLAATKMSECVLGQSKRVDFCGKGYHLMSFPQSAPHGVVFLHVTYVPAHEKNFTTAPAICHDGKAHFPREGVFVSNGTHWFVTQRNFYEPQIITTDNTFVSGNCDVVIGIVNNTVYDPLQPELDSFKEELDKYFKNHTSPDVDLGDISGINASVVNIQKEIDRLNEVAKNLNESLIDLQELGKYGSGSGSGSGSGSGSGSGSGSGSGSGSGSGSGSMGGWSSKPRQGMGTNLSVPNPLGFFPDHQLDPAFGANSNNPDWDFNPNKDQWPEANQVGAGAFGPGFTPPHGGLLGWSPQAQGILTTVPAAPPPASTNRQSGRQPTPISPPLRDSHPQAMQWNSTTFHQALLDPRVRGLYFPAGGSSSGTVNPVPTTASPISSIFSRTGDPAPNMENTTSGFLGPLLVLQAGFFLLTRILTIPQSLDSWWTSLNFLGGAPTCPGQNSQSPTSNHSPTSCPPICPGYRWMCLRRFIIFLFILLLCLIFLLVLLDYQGMLPVCPLLPGTSTTSTGPCKTCTIPAQGTSMFPSCCCTKPSDGNCTCIPIPSSWAFARFLWEWASVRFSWLSLLVPFVQWFVGLSPTVWLSVIWMMWYWGPSLYNILSPFLPLLPIFFCLWVYI

SEQ ID NO: 278 - protein, 1631 aa, synthetic construct
  REGION 1..1631: note = Recombinant Sequence
MFVFLVLLPLVSSQCVNLTTRTQLPPAYTNSFTRGVYYPDKVFRSSVLHSTQDLFLPFFSNVTWFHAIHVSGTNVIKRFDNPVLPFNDGVYFASTEKSNIIRGWIFGTTLDSKTQSLLIVNNATNVVIKVCEFQFCNDPFLGVYYHKNNKSWMESEFRVYSSANNCTFEYVSQPFLMDLEGKQGNFKNLREFVFKNIDGYFKIYSKHTPINLVRDLPQGFSALEPLVDLPIGINITRFQTLLALHNSSSGWTAGAAAYYVGYLQPRTFLLKYNENGTITDAVDCALDPLSETKCTLKSFTVEKGIYQTSNFRVQPTESIVRFPNITNLCPFGEVFNATRFASVYAWNRKRISNCVADYSVLYNSASFSTFKCYGVSPTKLNDLCFTNVYADSFVIRGDEVRQIAPGQTGKIADYNYKLPDDFTGCVIAWNSNNLDSKVGGNYNYQYRLFRKSNLKPFERDISTEIYQAGSTPCNGVEGFNCYSPLQSYGFQPTNGVGYQPYRVVVLSFELLHAPATVCGPKKSTNLVKNKCVNFNFNGLTGTGVLTESNKKFLPFQQFGRDIADTTDAVRDPQTLEILDITPCSFGGVSVITPGTNTSNQVAVLYQGVNCTEVPVAIHADQLTPTWRVYSTGSNVFQTRAGCLIGAEHVNNSYECDIPIGAGICASYQTQTNSPGSASSVASQSIIAYTMSLGAENSVAYSNNSIAIPTNFTISVTTEILPVSMTKTSVDCTMYICGDSTECSNLLLQYGSFCTQLNRALTGIAVEQDKNTQEVFAQVKQIYKTPPIKDFGGFNFSQILPDPSKPSKRSPIEDLLFNKVTLADAGFIKQYGDCLGDIAARDLICAQKFNGLNVLPPLLTDEMIAQYTSALLAGTITSGWTFGAGPALQIPFPMQMAYRFNGIGVTQNVLYENQKLIANQFNSAIGKIQDSLSSTPSALGKLQDVVNQNAQALNTLVKQLSSNFGAISSVLNDILSRLDPPEAEVQIDRLITGRLQSLQTYVTQQLIRAAEIRASANLAATKMSECVLGQSKRVDFCGKGYHLMSFPQSAPHGVVFLHVTYVPAQEKNFTTAPAICHDGKAHFPREGVFVSNGTHWFVTQRNFYEPQIITTDNTFVSGNCDVVIGIVNNTVYDPLQPELDSFKEELDKYFKNHTSPDVDLGDISGINASVVNIQKEIDRLNEVAKNLNESLIDLQELGKYGSGSGSGSGSGSGSGSGSGSGSGSGSGSGSGSMGGWSSKPRQGMGTNLSVPNPLGFFPDHQLDPAFGANSNNPDWDFNPNKDQWPEANQVGAGAFGPGFTPPHGGLLGWSPQAQGILTTVPAAPPPASTNRQSGRQPTPISPPLRDSHPQAMQWNSTTFHQALLDPRVRGLYFPAGGSSSGTVNPVPTTASPISSIFSRTGDPAPNMENTTSGFLGPLLVLQAGFFLLTRILTIPQSLDSWWTSLNFLGGAPTCPGQNSQSPTSNHSPTSCPPICPGYRWMCLRRFIIFLFILLLCLIFLLVLLDYQGMLPVCPLLPGTSTTSTGPCKTCTIPAQGTSMFPSCCCTKPSDGNCTCIPIPSSWAFARFLWEWASVRFSWLSLLVPFVQWFVGLSPTVWLSVIWMMWYWGPSLYNILSPFLPLLPIFFCLWVYI

SEQ ID NO: 279 - protein, 1630 aa, synthetic construct
  REGION 1..1630: note = Recombinant Sequence
MFVFLVLLPLVSSQCVNLTTRTQLPPAYTNSFTRGVYYPDKVFRSSVLHSTQDLFLPFFSNVTWFHAIHVSGTNVIKRFDNPVLPFNDGVYFASTEKSNIIRGWIFGTTLDSKTQSLLIVNNATNVVIKVCEFQFCNDPFLGVYYHKNNKSWMESEFRVYSSANNCTFEYVSQPFLMDLEGKQGNFKNLREFVFKNIDGYFKIYSKHTPINLVRDLPQGFSALEPLVDLPIGINITRFQTLLALHSSSGWTAGAAAYYVGYLQPRTFLLKYNENGTITDAVDCALDPLSETKCTLKSFTVEKGIYQTSNFRVQPTESIVRFPNITNLCPFGEVFNATRFASVYAWNRKRISNCVADYSVLYNSASFSTFKCYGVSPTKLNDLCFTNVYADSFVIRGDEVRQIAPGQTGKIADYNYKLPDDFTGCVIAWNSNNLDSKVGGNYNYQYRLFRKSNLKPFERDISTEIYQAGSTPCNGVEGFNCYSPLQSYGFQPTNGVGYQPYRVVVLSFELLHAPATVCGPKKSTNLVKNKCVNFNFNGLTGTGVLTESNKKFLPFQQFGRDIADTTDAVRDPQTLEILDITPCSFGGVSVITPGTNTSNQVAVLYQGVNCTEVPVAIHADQLTPTWRVYSTGSNVFQTRAGCLIGAEHVNNSYECDIPIGAGICASYQTQTNSPGSASSVASQSIIAYTMSLGAENSVAYSNNSIAIPTNFTISVTTEILPVSMTKTSVDCTMYICGDSTECSNLLLQYGSFCTQLNRALTGIAVEQDKNTQEVFAQVKQIYKTPPIKDFGGFNFSQILPDPSKPSKRSPIEDLLFNKVTLADAGFIKQYGDCLGDIAARDLICAQKFNGLNVLPPLLTDEMIAQYTSALLAGTITSGWTFGAGPALQIPFPMQMAYRFNGIGVTQNVLYENQKLIANQFNSAIGKIQDSLSSTPSALGKLQDVVNQNAQALNTLVKQLSSNFGAISSVLNDILSRLDPPEAEVQIDRLITGRLQSLQTYVTQQLIRAAEIRASANLAATKMSECVLGQSKRVDFCGKGYHLMSFPQSAPHGVVFLHVTYVPAQEKNFTTAPAICHDGKAHFPREGVFVSNGTHWFVTQRNFYEPQIITTDNTFVSGNCDVVIGIVNNTVYDPLQPELDSFKEELDKYFKNHTSPDVDLGDISGINASVVNIQKEIDRLNEVAKNLNESLIDLQELGKYGSGSGSGSGSGSGSGSGSGSGSGSGSGSGSGSMGGWSSKPRQGMGTNLSVPNPLGFFPDHQLDPAFGANSNNPDWDFNPNKDQWPEANQVGAGAFGPGFTPPHGGLLGWSPQAQGILTTVPAAPPPASTNRQSGRQPTPISPPLRDSHPQAMQWNSTTFHQALLDPRVRGLYFPAGGSSSGTVNPVPTTASPISSIFSRTGDPAPNMENTTSGFLGPLLVLQAGFFLLTRILTIPQSLDSWWTSLNFLGGAPTCPGQNSQSPTSNHSPTSCPPICPGYRWMCLRRFIIFLFILLLCLIFLLVLLDYQGMLPVCPLLPGTSTTSTGPCKTCTIPAQGTSMFPSCCCTKPSDGNCTCIPIPSSWAFARFLWEWASVRFSWLSLLVPFVQWFVGLSPTVWLSVIWMMWYWGPSLYNILSPFLPLLPIFFCLWVYI

SEQ ID NO: 280 - protein, 1638 aa, synthetic construct
  REGION 1..1638: note = Recombinant Sequence
MFVFLVLLPLVSSQCVNLTTRTQLPPAYTNSFTRGVYYPDKVFRSSVLHSTQDLFLPFFSNVTWFHAIHVSGTNGTKRFDNPVLPFNDGVYFASTEKSNIIRGWIFGTTLDSKTQSLLIVNNATNVVIKVCEFQFCNDPFLGVYYHKNNKSLMESEFRVYSSANNCTFEYVSQPFLMDLEGKQGNFKNLREFVFKNIDGYFKIYSKHTPINLVRDLPQGFSALEPLVDLPIGINITRFQTLLALHRSYLTPGDSSSGWTAGAAAYYVGYLQPRTFLLKYNENGTITDAVDCALDPLSETKCTLKSFTVEKGIYQTSNFRVQPTESIVRFPNITNLCPFGEVFNATRFASVYAWNRKRISNCVADYSVLYNSASFSTFKCYGVSPTKLNDLCFTNVYADSFVIRGDEVRQIAPGQTGKIADYNYKLPDDFTGCVIAWNSNNLDSKVGGNYNYLYRLFRKSNLKPFERDISTEIYQAGSTPCNGVKGFNCYFPLQSYGFQPTNGVGYQPYRVVVLSFELLHAPATVCGPKKSTNLVKNKCVNFNFNGLTGTGVLTESNKKFLPFQQFGRDIADTTDAVRDPQTLEILDITPCSFGGVSVITPGTNTSNQVAVLYQGVNCTEVPVAIHADQLTPTWRVYSTGSNVFQTRAGCLIGAEHVNNSYECDIPIGAGICASYQTQTNSPGSASSVASQSIIAYTMSLGAENSVAYSNNSIAIPTNFTISVTTEILPVSMTKTSVDCTMYICGDSTECSNLLLQYGSFCTQLNRALTVIAVEQDKNTQEVFAQVKQIYKTPPIKDFGGFNFSQILPDPSKPSKRSPIEDLLFNKVTLADAGFIKQYGDCLGDIAARDLICAQKFNGLTVLPPLLTDEMIAQYTSALLAGTITSGWTFGAGPALQIPFPMQMAYRFNGIGVTQNVLYENQKLIANQFNSAIGKIQDSLSSTPSALGKLQDVVNQNAQALNTLVKQLSSNFGAISSVLNDILSRLDPPEAEVQIDRLITGRLQSLQTYVTQQLIRAAEIRASANLAATKMSECVLGQSKRVDFCGKGYHLMSFPQSAPHGVVFLHVTYVPAQEKNFTTAPAICHDGKAHFPREGVFVSNGTHWFVTQRNFYEPQIITTDNTFVSGNCDVVIGIVNNTVYDPLQPELDSFKEELDKYFKNHTSPDVDLGDISGINASVVNIQKEIDRLNEVAKNLNESLIDLQELGKYGSGSGSGSGSGSGSGSGSGSGSGSGSGSGSGSMGGWSSKPRQGMGTNLSVPNPLGFFPDHQLDPAFGANSNNPDWDFNPNKDQWPEANQVGAGAFGPGFTPPHGGLLGWSPQAQGILTTVPAAPPPASTNRQSGRQPTPISPPLRDSHPQAMQWNSTTFHQALLDPRVRGLYFPAGGSSSGTVNPVPTTASPISSIFSRTGDPAPNMENTTSGFLGPLLVLQAGFFLLTRILTIPQSLDSWWTSLNFLGGAPTCPGQNSQSPTSNHSPTSCPPICPGYRWMCLRRFIIFLFILLLCLIFLLVLLDYQGMLPVCPLLPGTSTTSTGPCKTCTIPAQGTSMFPSCCCTKPSDGNCTCIPIPSSWAFARFLWEWASVRFSWLSLLVPFVQWFVGLSPTVWLSVIWMMWYWGPSLYNILSPFLPLLPIFFCLWVYI

SEQ ID NO: 281 - protein, 1638 aa, synthetic construct
  REGION 1..1638: note = Recombinant Sequence
MFVFLVLLPLVSSQCVNLTTRTQLPPAYTNSFTRGVYYPDKVFRSSVLHSTQDLFLPFFSNVTWFHAIHVSGTNGTKRFDNPVLPFNDGVYFASTEKSNIIRGWIFGTTLDSKTQSLLIVNNATNVVIKVCEFQFCNDPFLGVYYHKNNKSWMESEFRVYSSANNCTFEYVSQPFLMDLEGKQGNFKNLREFVFKNIDGYFKIYSKHTPINLVRDLPQGFSALEPLVDLPIGINITRFQTLLALHRSYLTPGDSSSGWTAGAAAYYVGYLQPRTFLLKYNENGTITDAVDCALDPLSETKCTLKSFTVEKGIYQTSNFRVQPTESIVRFPNITNLCPFGEVFNATRFASVYAWNRKRISNCVADYSVLYNSASFSTFKCYGVSPTKLNDLCFTNVYADSFVIRGDEVRQIAPGQTGKIADYNYKLPDDFTGCVIAWNSNNLDSKVGGNYNYLYRLFRKSNLKPFERDISTEIYQAGSKPCNGVEGFNCYFPLQSYGFQPTNGVGYQPYRVVVLSFELLHAPATVCGPKKSTNLVKNKCVNFNFNGLTGTGVLTESNKKFLPFQQFGRDIADTTDAVRDPQTLEILDITPCSFGGVSVITPGTNTSNQVAVLYQGVNCTEVPVAIHADQLTPTWRVYSTGSNVFQTRAGCLIGAEHVNNSYECDIPIGAGICASYQTQTNSHGSASSVASQSIIAYTMSLGAENSVAYSNNSIAIPTNFTISVTTEILPVSMAKTSVDCTMYICGDSTECSNLLLQYGSFCTQLNRALTGIAVEQDKNTQEVFAQVKQIYKTPPIKDFGGFNFSQILPDPSKPSKRSPIEDLLFNKVTLADAGFIKQYGDCLGDIAARDLICAQKFNGLTVLPPLLTDEMIAQYTSALLAGTITSGWTFGAGPALQIPFPMQMAYRFNGIGVTQNVLYENQKLIANQFNSAIGKIQDSLSSTPSALGKLQDVVNQNAQALNTLVKQLSSNFGAISSVLNDILSRLDPPEAEVQIDRLITGRLQSLQTYVTQQLIRAAEIRASANLAATKMSECVLGQSKRVDFCGKGYHLMSFPQSAPHGVVFLHVTYVPAQEKNFTTAPAICHDGKAHFPREGVFVSNGTHWFVTQRNFYEPQIITTDNTFVSGNCDVVIGIVNNTVYDPLQPELDSFKEELDKYFKNHTSPDVDLGDISGINASVVNIQKEIDRLNEVAKNLNESLIDLQELGKYGSGSGSGSGSGSGSGSGSGSGSGSGSGSGSGSMGGWSSKPRQGMGTNLSVPNPLGFFPDHQLDPAFGANSNNPDWDFNPNKDQWPEANQVGAGAFGPGFTPPHGGLLGWSPQAQGILTTVPAAPPPASTNRQSGRQPTPISPPLRDSHPQAMQWNSTTFHQALLDPRVRGLYFPAGGSSSGTVNPVPTTASPISSIFSRTGDPAPNMENTTSGFLGPLLVLQAGFFLLTRILTIPQSLDSWWTSLNFLGGAPTCPGQNSQSPTSNHSPTSCPPICPGYRWMCLRRFIIFLFILLLCLIFLLVLLDYQGMLPVCPLLPGTSTTSTGPCKTCTIPAQGTSMFPSCCCTKPSDGNCTCIPIPSSWAFARFLWEWASVRFSWLSLLVPFVQWFVGLSPTVWLSVIWMMWYWGPSLYNILSPFLPLLPIFFCLWVYI

SEQ ID NO: 282 - protein, 1635 aa, synthetic construct
  REGION 1..1635: note = Recombinant Sequence
MFVFLVLLPLVSSQCVNLTTRTQLPPAYTNSFTRGVYYPDKVFRSSVLHSTRDLFLPFFSNVTWFHVISGTNGTKRFDNPVLPFNDGVYFASTEKSNIIRGWIFGTTLDSKTQSLLIVNNATNVVIKVCEFQFCNDPFLGVYHKNNKSWMESEFRVYSSANNCTFEYVSQPFLMDLEGKQGNFKNLREFVFKNIDGYFKIYSKHTPINLVRDLPQGFSALEPLVDLPIGINITRFQTLLALHRSYLTPGDSSSGWTAGAAAYYVGYLQPRTFLLKYNENGTITDAVDCALDPLSETKCTLKSFTVEKGIYQTSNFRVQPTESIVRFPNITNLCPFGEVFNATRFASVYAWNRKRISNCVADYSVLYNSASFSTFKCYGVSPTKLNDLCFTNVYADSFVIRGDEVRQIAPGQTGKIADYNYKLPDDFTGCVIAWNSNNLDSKVGGNYNYLYRLFRKSNLKPFERDISTEIYQAGSTPCNGVKGFNCYFPLQSYGFQPTNGVGYQPYRVVVLSFELLHAPATVCGPKKSTNLVKNKCVNFNFNGLTGTGVLTESNKKFLPFQQFGRDIADTTDAVRDPQTLEILDITPCSFGGVSVITPGTNTSNQVAVLYQGVNCTEVPVAIHADQLTPTWRVYSTGSNVFQTRAGCLIGAEHVNNSYECDIPIGAGICASYQTHTNSPGSASSVASQSIIAYTMSLGAENSVAYSNNSIAIPTNFTISVTTEILPVSMTKTSVDCTMYICGDSTECSNLLLQYGSFCTQLNRALTGIAVEQDKNTQEVFAQVKQIYKTPPIKDFGGFNFSQILPDPSKPSKRSPIEDLLFNKVTLADAGFIKQYGDCLGDIAARDLICAQKFNGLTVLPPLLTDEMIAQYTSALLAGTITSGWTLGAGPALQIPFPMQMAYRFNGIGVTQNVLYENQKLIANQFNSAIGKIQDSLSSTPSALGKLQDVVNQNAQALNTLVKQLSSNFGAISSVLNDILSRLDPPEAEVQIDRLITGRLQSLQTYVTQQLIRAAEIRASANLAATKMSECVLGQSKRVDFCGKGYHLMSFPQSAPHGVVFLHVTYVPAQEKNFTTAPAICHDGKAHFPREGVFVSNGTHWFVTQRNFYEPQIITTDNTFVSGNCDVVIGIVNNTVYDPLQPELDSFKEELDKYFKNHTSPDVDLGDISGINASVVNIQKEIDRLNEVAKNLNESLIDLQELGKYGSGSGSGSGSGSGSGSGSGSGSGSGSGSGSGSMGGWSSKPRQGMGTNLSVPNPLGFFPDHQLDPAFGANSNNPDWDFNPNKDQWPEANQVGAGAFGPGFTPPHGGLLGWSPQAQGILTTVPAAPPPASTNRQSGRQPTPISPPLRDSHPQAMQWNSTTFHQALLDPRVRGLYFPAGGSSSGTVNPVPTTASPISSIFSRTGDPAPNMENTTSGFLGPLLVLQAGFFLLTRILTIPQSLDSWWTSLNFLGGAPTCPGQNSQSPTSNHSPTSCPPICPGYRWMCLRRFIIFLFILLLCLIFLLVLLDYQGMLPVCPLLPGTSTTSTGPCKTCTIPAQGTSMFPSCCCTKPSDGNCTCIPIPSSWAFARFLWEWASVRFSWLSLLVPFVQWFVGLSPTVWLSVIWMMWYWGPSLYNILSPFLPLLPIFFCLWVYI

SEQ ID NO: 283 - protein, 1638 aa, synthetic construct
  REGION 1..1638: note = Recombinant Sequence
MFVFFVLLPLVSSQCVNLTTRTQLPPAYTNSFTRGVYYPDKVFRSSVLHSTQDLFLPFFSNVTWFHAIHVSGTNGTKRFDNPVLPFNDGVYFASIEKSNIIRGWIFGTTLDSKTQSLLIVNNATNVVIKVCEFQFCNDPFLGVYYHKNNKSWMESEFRVYSSANNCTFEYVSQPFLMDLEGKQGNFKNLREFVFKNIDGYFKIYSKHTPINLVRDLPQGFSALEPLVDLPIGINITRFQTLLALHRSYLTPGGSSSGWTAGAAAYYVGYLQPRTFLLKYNENGTITDAVDCALDPLSETKCTLKSFTVEKGIYQTSNFRVQPTESIVRFPNITNLCPFGEVFNATRFASVYAWNRKRISNCVADYSVLYNSASFSTFKCYGVSPTKLNDLCFTNVYADSFVIRGDEVRQIAPGQTGKIADYNYKLPDDFTGCVIAWNSNNLDSKVGGNYNYLYRLFRKSNLKPFERDISTEIYQAGSTPCNGVKGFNCYFPLQSYGFQPTNGVGYQPYRVVVLSFELLHAPATVCGPKKSTNLVKNKCVNFNFNGLTGTGVLTESNKKFLPFQQFGRDIADTTDAVRDPQTLEILDITPCSFGGVSVITPGTNTSNQVAVLYQGVNCTEVPVAIHADQLTPTWRVYSTGSNVFQTRAGCLIGAEHVNNSYECDIPIGAGICASYQTQTNSPGSASSVASQSIIAYTMSLGVENSVAYSNNSIAIPTNFTISVTTEILPVSMTKTSVDCTMYICGDSTECSNLLLQYGSFCTQLNRALTGIAVEQDKNTQEVFAQVKQIYKTPPIKDFGGFNFSQILPDPSKPSKRSPIEDLLFNKVTLADAGFIKQYGDCLGDIAARDLICAQKFNGLTVLPPLLTDEMIAQYTSALLAGTITSGWTFGAGPALQIPFPMQMAYRFNGIGVTQNVLYENQKLIANQFNSAIGKIQDSLSSTPSALGKLQDVVNQNAQALNTLVKQLSSNFGAISSVLNDILSRLDPPEAEVQIDRLITGRLQSLQTYVTQQLIRAAEIRASANLAATKMSECVLGQSKRVDFCGKGYHLMSFPQSAPHGVVFLHVTYVPAQEKNFTTAPAICHDGKAHFPREGVFVSNGTHWFVTQRNFYEPQIITTDNTFVSGNCDVVIGIVNNTVYDPLQPELDSFKEELDKYFKNHTSPDVDLGDISGINASVVNIQKEIDRLNEVAKNLNESLIDLQELGKYGSGSGSGSGSGSGSGSGSGSGSGSGSGSGSGSMGGWSSKPRQGMGTNLSVPNPLGFFPDHQLDPAFGANSNNPDWDFNPNKDQWPEANQVGAGAFGPGFTPPHGGLLGWSPQAQGILTTVPAAPPPASTNRQSGRQPTPISPPLRDSHPQAMQWNSTTFHQALLDPRVRGLYFPAGGSSSGTVNPVPTTASPISSIFSRTGDPAPNMENTTSGFLGPLLVLQAGFFLLTRILTIPQSLDSWWTSLNFLGGAPTCPGQNSQSPTSNHSPTSCPPICPGYRWMCLRRFIIFLFILLLCLIFLLVLLDYQGMLPVCPLLPGTSTTSTGPCKTCTIPAQGTSMFPSCCCTKPSDGNCTCIPIPSSWAFARFLWEWASVRFSWLSLLVPFVQWFVGLSPTVWLSVIWMMWYWGPSLYNILSPFLPLLPIFFCLWVYI

SEQ ID NO: 284 - protein, 1638 aa, synthetic construct
  REGION 1..1638: note = Recombinant Sequence
MFVFLVLLPLVSIQCVNLTTRTQLPPAYTNSFTRGVYYPDKVFRSSVLHSTQDLFLPFFSNVTWFHAIHVSGTNGTKRFDNPVLPFNDGVYFASTEKSNIIRGWIFGTTLDSKTQSLLIVNNATNVVIKVCEFQFCNDPFLGVYYHKNNKSCMESEFRVYSSANNCTFEYVSQPFLMDLEGKQGNFKNLREFVFKNIDGYFKIYSKHTPINLVRDLPQGFSALEPLVDLPIGINITRFQTLLALHRSYLTPGDSSSGWTAGAAAYYVGYLQPRTFLLKYNENGTITDAVDCALDPLSETKCTLKSFTVEKGIYQTSNFRVQPTESIVRFPNITNLCPFGEVFNATRFASVYAWNRKRISNCVADYSVLYNSASFSTFKCYGVSPTKLNDLCFTNVYADSFVIRGDEVRQIAPGQTGKIADYNYKLPDDFTGCVIAWNSNNLDSKVGGNYNYRYRLFRKSNLKPFERDISTEIYQAGSTPCNGVEGFNCYFPLQSYGFQPTNGVGYQPYRVVVLSFELLHAPATVCGPKKSTNLVKNKCVNFNFNGLTGTGVLTESNKKFLPFQQFGRDIADTTDAVRDPQTLEILDITPCSFGGVSVITPGTNTSNQVAVLYQGVNCTEVPVAIHADQLTPTWRVYSTGSNVFQTRAGCLIGAEHVNNSYECDIPIGAGICASYQTQTNSPGSASSVASQSIIAYTMSLGAENSVAYSNNSIAIPTNFTISVTTEILPVSMTKTSVDCTMYICGDSTECSNLLLQYGSFCTQLNRALTGIAVEQDKNTQEVFAQVKQIYKTPPIKDFGGFNFSQILPDPSKPSKRSPIEDLLFNKVTLADAGFIKQYGDCLGDIAARDLICAQKFNGLTVLPPLLTDEMIAQYTSALLAGTITSGWTFGAGPALQIPFPMQMAYRFNGIGVTQNVLYENQKLIANQFNSAIGKIQDSLSSTPSALGKLQDVVNQNAQALNTLVKQLSSNFGAISSVLNDILSRLDPPEAEVQIDRLITGRLQSLQTYVTQQLIRAAEIRASANLAATKMSECVLGQSKRVDFCGKGYHLMSFPQSAPHGVVFLHVTYVPAQEKNFTTAPAICHDGKAHFPREGVFVSNGTHWFVTQRNFYEPQIITTDNTFVSGNCDVVIGIVNNTVYDPLQPELDSFKEELDKYFKNHTSPDVDLGDISGINASVVNIQKEIDRLNEVAKNLNESLIDLQELGKYGSGSGSGSGSGSGSGSGSGSGSGSGSGSGSGSMGGWSSKPRQGMGTNLSVPNPLGFFPDHQLDPAFGANSNNPDWDFNPNKDQWPEANQVGAGAFGPGFTPPHGGLLGWSPQAQGILTTVPAAPPPASTNRQSGRQPTPISPPLRDSHPQAMQWNSTTFHQALLDPRVRGLYFPAGGSSSGTVNPVPTTASPISSIFSRTGDPAPNMENTTSGFLGPLLVLQAGFFLLTRILTIPQSLDSWWTSLNFLGGAPTCPGQNSQSPTSNHSPTSCPPICPGYRWMCLRRFIIFLFILLLCLIFLLVLLDYQGMLPVCPLLPGTSTTSTGPCKTCTIPAQGTSMFPSCCCTKPSDGNCTCIPIPSSWAFARFLWEWASVRFSWLSLLVPFVQWFVGLSPTVWLSVIWMMWYWGPSLYNILSPFLPLLPIFFCLWVYI

SEQ ID NO: 285 - protein, 1637 aa, synthetic construct
  REGION 1..1637: note = Recombinant Sequence
MFVFLVLLPLVSSQCVNLTTRTQLPPAYTNSFTRGVYYPDKVFRSSVLHSTQDLFLPFFSNVTWFHAIHVSGTNGTKRFGNPVLPFNDGVYFASTEKSNIIRGWIFGTTLDSKTQSLLIVNNATNVVIKVCEFQFCNDPFLGVYHKNNKSWMESESRVYSSANNCTFEYVSQPFLMDLEGKQGNFKNLREFVFKNIDGYFKIYSKHTPINLVRDLPQGFSALEPLVDLPIGINITRFQTLLALHRSYLTPGDSSSGWTAGAAAYYVGYLQPRTFLLKYNENGTITDAVDCALDPLSETKCTLKSFTVEKGIYQTSNFRVQPTESIVRFPNITNLCPFGEVFNATRFASVYAWNRKRISNCVADYSVLYNSASFSTFKCYGVSPTKLNDLCFTNVYADSFVIRGDEVRQIAPGQTGKIADYNYKLPDDFTGCVIAWNSNNLDSKVGGNYNYRYRLFRKSNLKPFERDISTEIYQAGSTPCNGVEGFNCYFPLQSYGFQPTNGVGYQPYRVVVLSFELLHAPATVCGPKKSTNLVKNKCVNFNFNGLTGTGVLTESNKKFLPFQQFGRDIADTTDAVRDPQTLEILDITPCSFGGVSVITPGTNTSNQVAVLYQGVNCTEVPVAIHADQLTPTWRVYSTGSNVFQTRAGCLIGAEHVNNSYECDIPIGAGICASYQTQTNSPGSASSVASQSIIAYTMSLGAENSVAYSNNSIAIPTNFTISVTTEILPVSMTKTSVDCTMYICGDSTECSNLLLQYGSFCTQLNRALTGIAVEQDKNTQEVFAQVKQIYKTPPIKDFGGFNFSQILPDPSKPSKRSPIEDLLFNKVTLADAGFIKQYGDCLGDIAARDLICAQKFNGLNVLPPLLTDEMIAQYTSALLAGTITSGWTFGAGPALQIPFPMQMAYRFNGIGVTQNVLYENQKLIANQFNSAIGKIQDSLSSTPSALGKLQHVVNQNAQALNTLVKQLSSNFGAISSVLNDILSRLDPPEAEVQIDRLITGRLQSLQTYVTQQLIRAAEIRASANLAATKMSECVLGQSKRVDFCGKGYHLMSFPQSAPHGVVFLHVTYVPAQEKNFTTAPAICHDGKAHFPREGVFVSNGTHWFVTQRNFYEPQIITTDNTFVSGNCDVVIGIVNNTVYDPLQPELDSFKEELDKYFKNHTSPDVDLGDISGINASVVNIQKEIDRLNEVAKNLNESLIDLQELGKYGSGSGSGSGSGSGSGSGSGSGSGSGSGSGSGSMGGWSSKPRQGMGTNLSVPNPLGFFPDHQLDPAFGANSNNPDWDFNPNKDQWPEANQVGAGAFGPGFTPPHGGLLGWSPQAQGILTTVPAAPPPASTNRQSGRQPTPISPPLRDSHPQAMQWNSTTFHQALLDPRVRGLYFPAGGSSSGTVNPVPTTASPISSIFSRTGDPAPNMENTTSGFLGPLLVLQAGFFLLTRILTIPQSLDSWWTSLNFLGGAPTCPGQNSQSPTSNHSPTSCPPICPGYRWMCLRRFIIFLFILLLCLIFLLVLLDYQGMLPVCPLLPGTSTTSTGPCKTCTIPAQGTSMFPSCCCTKPSDGNCTCIPIPSSWAFARFLWEWASVRFSWLSLLVPFVQWFVGLSPTVWLSVIWMMWYWGPSLYNILSPFLPLLPIFFCLWVYI

SEQ ID NO: 286 - protein, 1638 aa, synthetic construct
  REGION 1..1638: note = Recombinant Sequence
MFVFLVLLPLVSSQCVNLTTRTQLPPAYTNSFTRGVYYPDKVFRSSVLHSTQDLFLPFFSNVTWFHAIHVSGTNGTKRFDNPVLPFNDGVYFASTEKSNIIRGWIFGTTLDSKTQSLLIVNNATNVVIKVCEFQFCNDPFLGVYYHKNNKSWMESEFRVYSSANNCTFEYVSQPFLMDLEGKQGNFKNLREFVFKNIDGYFKIYSKHTPINLVRDLPQGFSALEPLVDLPIGINITRFQTLLALHRSYLTPGDSSSGWTAGAAAYYVGYLQPRTFLLKYNENGTITDAVDCALDPLSETKCTLKSFTVEKGIYQTSNFRVQPTESIVRFPNITNLCPFGEVFNATRFASVYAWNRKRISNCVADYSVLYNSASFSTFKCYGVSPTKLNDLCFTNVYADSFVIRGDEVRQIAPGQTGKIADYNYKLPDDFTGCVIAWNSNNLDSKVGGNYNYLYRLFRKSNLKPFERDISTEIYQAGSTPCNGVKGFNCYFPLQSYGFQPTNGVGYQPYRVVVLSFELLHAPATVCGPKKSTNLVKNKCVNFNFNGLTGTGVLTESNKKFLPFQQFGRDIADTTDAVRDPQTLEILDITPCSFGGVSVITPGTNTSNQVAVLYQGVNCTEVPVAIHADQLTPTWRVYSTGSNVFQTRAGCLIGAEHVNNSYECDIPIGAGICASYQTQTNSPGSASSVASQSIIAYTMSLGAENSVAYSNNSIAIPTNFTISVTTEILPVSMTKTSVDCTMYICGDSTECSNLLLQYGSFCTQLNRALTGIAVEQDKNTQEVFAQVKQIYKTPPIKDFGGFNFSQILPDPSKPSKRSPIEDLLFNKVTLADAGFIKQYGDCLGDIAARDLICAQKFNGLTVLPPLLTDEMIAQYTSALLAGTITSGWTFGAGPALQIPFPMQMAYRFNGIGVTQNVLYENQKLIANQFNSAIGKIQDSLSSTPSALGKLQDVVNQNAQALNTLVKQLSSNFGAISSVLNDILSRLDPPEAEVQIDRLITGRLQSLQTYVTQQLIRAAEIRASANLAATKMSECVLGQSKRVDFCGKGYHLMSFPQSAPHGVVFLHVTYVPAQEKNFTTAPAICHDGKAHFPREGVFVSNGTHWFVTQRNFYEPQIITTDNTFVSGNCDVVIGIVNNTVYDPLQPELDSFKEELDKYFKNHTSPDVDLGDISGINASFVNIQKEIDRLNEVAKNLNESLIDLQELGKYGSGSGSGSGSGSGSGSGSGSGSGSGSGSGSGSMGGWSSKPRQGMGTNLSVPNPLGFFPDHQLDPAFGANSNNPDWDFNPNKDQWPEANQVGAGAFGPGFTPPHGGLLGWSPQAQGILTTVPAAPPPASTNRQSGRQPTPISPPLRDSHPQAMQWNSTTFHQALLDPRVRGLYFPAGGSSSGTVNPVPTTASPISSIFSRTGDPAPNMENTTSGFLGPLLVLQAGFFLLTRILTIPQSLDSWWTSLNFLGGAPTCPGQNSQSPTSNHSPTSCPPICPGYRWMCLRRFIIFLFILLLCLIFLLVLLDYQGMLPVCPLLPGTSTTSTGPCKTCTIPAQGTSMFPSCCCTKPSDGNCTCIPIPSSWAFARFLWEWASVRFSWLSLLVPFVQWFVGLSPTVWLSVIWMMWYWGPSLYNILSPFLPLLPIFFCLWVYI

SEQ ID NO: 287 - protein, 1638 aa, synthetic construct
  REGION 1..1638: note = Recombinant Sequence
MFVFLVLLPLVSSQCVNLTTRTQLPPAYTNSFTRGVYYPDKVFRSSVLHSTQDLFLPFFSNVTWFHAIHVSGTNGTKRFDNPVLPFNDGVYFASTEKSNIIRGWIFGTTLDSKTQSLLIVNNATNVVIKVCEFQFCNDPFLGVYYHKNNKSWMESELRVYSSANNCTFEYVSQPFLMDLEGKQGNFKNLREFVFKNIDGYFKIYSKHTPINLVRDLPQGFSALEPLVDLPIGINITRFQTLLALHRSYLTPGDSSSGWTAGAAAYYVGYLQPRTFLLKYNENGTITDAVDCALDPLSETKCTLKSFTVEKGIYQTSNFRVQPTESIVRFPNITNLCPFGEVFNATRFASVYAWNRKRISNCVADYSFLYNSASFSTFKCYGVSPTKLNDLCFTNVYADSFVIRGDEVRQIAPGQTGKIADYNYKLPDDFTGCVIAWNSNNLDSKVGGNYNYLYRLFRKSNLKPFERDISTEIYQAGSTPCNGVEGFNCYFPLQSYGFQPTNGVGYQPYRVVVLSFELLHAPATVCGPKKSTNLVKNKCVNFNFNGLTGTGVLTESNKKFLPFQQFGRDIADTTDAVRDPQTLEILDITPCSFGGVSVITPGTNTSNQVAVLYHGVNCTEVPVAIHADQLTPTWRVYSTGSNVFQTRAGCLIGAEHVNNSYECDIPIGAGICASYQTQTNSRGSASSVASQSIIAYTMSLGAENSVAYSNNSIAIPTNFTISVTTEILPVSMTKTSVDCTMYICGDSTECSNLLLQYGSFCTQLNRALTGIAVEQDKNTQEVFAQVKQIYKTPPIKDFGGFNFSQILPDPSKPSKRSPIEDLLFNKVTLADAGFIKQYGDCLGDIAARDLICAQKFNGLTVLPPLLTDEMIAQYTSALLAGTITSGWTFGAGPALQIPFPMQMAYRFNGIGVTQNVLYENQKLIANQFNSAIGKIQDSLSSTPSALGKLQDVVNQNAQALNTLVKQLSSNFGAISSVLNDILSRLDPPEAEVQIDRLITGRLQSLQTYVTQQLIRAAEIRASANLAATKMSECVLGQSKRVDFCGKGYHLMSFPQSAPHGVVFLHVTYVPAQEKNFTTAPAICHDGKAHFPREGVFVSNGTHWFVTQRNFYEPQIITTDNTFVSGNCDVVIGIVNNTVYDPLQPELDSFKEELDKYFKNHTSPDVDLGDISGINASVVNIQKEIDRLNEVAKNLNESLIDLQELGKYGSGSGSGSGSGSGSGSGSGSGSGSGSGSGSGSMGGWSSKPRQGMGTNLSVPNPLGFFPDHQLDPAFGANSNNPDWDFNPNKDQWPEANQVGAGAFGPGFTPPHGGLLGWSPQAQGILTTVPAAPPPASTNRQSGRQPTPISPPLRDSHPQAMQWNSTTFHQALLDPRVRGLYFPAGGSSSGTVNPVPTTASPISSIFSRTGDPAPNMENTTSGFLGPLLVLQAGFFLLTRILTIPQSLDSWWTSLNFLGGAPTCPGQNSQSPTSNHSPTSCPPICPGYRWMCLRRFIIFLFILLLCLIFLLVLLDYQGMLPVCPLLPGTSTTSTGPCKTCTIPAQGTSMFPSCCCTKPSDGNCTCIPIPSSWAFARFLWEWASVRFSWLSLLVPFVQWFVGLSPTVWLSVIWMMWYWGPSLYNILSPFLPLLPIFFCLWVYI

SEQ ID NO: 288 - protein, 1638 aa, synthetic construct
  REGION 1..1638: note = Recombinant Sequence
MFVFFVLLPLVSSQCVNLTTRTQLPPAYTNSFTRGVYYPDKVFRSSVLHSTQDLFLPFFSNVTWFHAIHVSGTNGTKRFDNPVLPFNDGVYFASIEKSNIIRGWIFGTTLDSKTQSLLIVNNATNVVIKVCEFQFCNDPFLGVYYHKNNKSWMESEFRVYSSANNCTFEYVSQPFLMDLEGKQGNFKNLREFVFKNIDGYFKIYSKHTPINLVRDLPQGFSALEPLVDLPIGINITRFQTLLALHRSYLTPGGSSSGWTAGAAAYYVGYLQPRTFLLKYNENGTITDAVDCALDPLSETKCTLKSFTVEKGIYQTSNFRVQPTESIVRFPNITNLCPFGEVFNATRFASVYAWNRKRISNCVADYSVLYNSASFSTFKCYGVSPTKLNDLCFTNVYADSFVIRGDEVRQIAPGQTGKIADYNYKLPDDFTGCVIAWNSNNLDSKVGGNYNYLYRLFRKSNLKPFERDISTEIYQAGNTPCNGVEGFNCYFPLQSYGFQPTNGVGYQPYRVVVLSFELLHAPATVCGPKKSTNLVKNKCVNFNFNGLTGTGVLTESNKKFLPFQQFGRDIADTTDAVRDPQTLEILDITPCSFGGVSVITPGTNTSNQVAVLYQGVNCTEVPVAIHADQLTPTWRVYSTGSNVFQTRAGCLIGAEHVNNSYECDIPIGAGICASYQTQTNSPGSASSVASQSIIAYTMSLGAENSVAYSNNSIAIPTNFTISVTTEILPVSMTKTSVDCTMYICGDSTECSNLLLQYGSFCTQLNRALTGIAVEQDKNTQEVFAQVKQIYKTPPIKDFGGFNFSQILPDPSKPSKRSPIEDLLFNKVTLADAGFIKQYGDCLGDIAARDLICAQKFNGLTVLPPLLTDEMIAQYTSALLAGTITSGWTFGAGPALQIPFPMQMAYRFNGIGVTQNVLYENQKLIANQFNSAIGKIQDSLSSTPSALGKLQDVVNQNARALNTLVKQLSSNFGAISSVLNDILSRLDPPEAEVQIDRLITGRLQSLQTYVTQQLIRAAEIRASANLAATKMSECVLGQSKRVDFCGKGYHLMSFPQSAPHGVVFLHVTYVPAQEKNFTTAPAICHDGKAHFPREGVFVSNGTHWFVTQRNFYEPQIITTDNTFVSGNCDVVIGIVNNTVYDPLQPELDSFKEELDKYFKNHTSPDVDLGDISGINASVVNIQKEIDRLNEVAKNLNESLIDLQELGKYGSGSGSGSGSGSGSGSGSGSGSGSGSGSGSGSMGGWSSKPRQGMGTNLSVPNPLGFFPDHQLDPAFGANSNNPDWDFNPNKDQWPEANQVGAGAFGPGFTPPHGGLLGWSPQAQGILTTVPAAPPPASTNRQSGRQPTPISPPLRDSHPQAMQWNSTTFHQALLDPRVRGLYFPAGGSSSGTVNPVPTTASPISSIFSRTGDPAPNMENTTSGFLGPLLVLQAGFFLLTRILTIPQSLDSWWTSLNFLGGAPTCPGQNSQSPTSNHSPTSCPPICPGYRWMCLRRFIIFLFILLLCLIFLLVLLDYQGMLPVCPLLPGTSTTSTGPCKTCTIPAQGTSMFPSCCCTKPSDGNCTCIPIPSSWAFARFLWEWASVRFSWLSLLVPFVQWFVGLSPTVWLSVIWMMWYWGPSLYNILSPFLPLLPIFFCLWVYI

SEQ ID NO: 289 - protein, 1633 aa, synthetic construct
  REGION 1..1633: note = Recombinant Sequence
MFVFLVLLPLVSSQCVNLTTRTQLPPAYTNSFTRGVYYPDKVFRSSVLHSTQDLFLPFFSNVTWFHAIHVSGTNGTKRFDNPVLPFNDGVYFASTEKSNIIRGWIFGTTLDSKTQSLLIVNNATNVVIKVCEFQFCNDPFYYHKNNKSWMESEFRVYSSANNCTFEYVSQPFLMDLEGKQGNFKNLREFVFKNIDGYFKIYSKHTPINLVRDLPQGFSALEPLVDLPIGINITRFQTLLHRSYLTPGDSSSGWTAGAAACYVGYLQPRTFLLKYNENGTITDAVDCALDPLSETKCTLKSFTVEKGIYQTSNFRVQPTESIVRFPNITNLCPFGEVFNATRFASVYAWNRKRISNCVADYSVLYNSASFSTFKCYGVSPTKLNDLCFTNVYADSFVIRGDEVRQIAPGQTGKIADYNYKLPDDFTGCVIAWNSNNLDSKVGGNYNYLYRLFRKSNLKPFERDISTEIYQAGSTPCNGVKGFNCYFPLQSYGFQPTYGVGYQPYRVVVLSFELLHAPATVCGPKKSTNLVKNKCVNFNFNGLTGTGVLTESNKKFLPFQQFGRDIADTTDAVRDPQTLEILDITPCSFGGVSVITPGTNTSNQVAVLYQGVNCTEVPVAIHADQLTPTWRVYSTGSNVFQTRAGCLIGAEHVNNSYECDIPIGAGICASYQTQTNSHGSASSVASQSIIAYTMSLGAENSVAYSNNSIAIPTNFTISVTTEILPVSMTKTSVDCTMYICGDSTECSNLLLQYGSFCTQLNRALTGIAVEQDKNTQEVFAQVKQIYKTPPIKDFGGFNFSQILPDPSKPSKRSPIEDLLFNKVTLADAGFIKQYGDCLGDIAARDLICAQKFNGLTVLPPLLTDEMIAQYTSALLAGTITSGWTFGAGPALQIPFPMQMAYRFNGIGVTQNVLYENQKLIANQFNSAIGKIQDSLSSTPSALGKLQDVVNQNAQALNTLVKQLSSNFGAISSVLNDILSRLDPPEAEVQIDRLITGRLQSLQTYVTQQLIRAAEIRASANLAATKMSECVLGQSKRVDFCGKGYHLMSFPQSAPHGVVFLHVTYVPAQEKNFTTAPAICHDGKAHFPRKGVFVSNGTYWFVTQRNFYEPQIITTDNTFVSGNCDVVIGIVNNTVYDPLQPELDSFKEELDKYFKNHTSPDVDLGDISGINASFVNIQKEIDRLNEVAKNLNESLIDLQELGKYGSGSGSGSGSGSGSGSGSGSGSGSGSGSGSGSMGGWSSKPRQGMGTNLSVPNPLGFFPDHQLDPAFGANSNNPDWDFNPNKDQWPEANQVGAGAFGPGFTPPHGGLLGWSPQAQGILTTVPAAPPPASTNRQSGRQPTPISPPLRDSHPQAMQWNSTTFHQALLDPRVRGLYFPAGGSSSGTVNPVPTTASPISSIFSRTGDPAPNMENTTSGFLGPLLVLQAGFFLLTRILTIPQSLDSWWTSLNFLGGAPTCPGQNSQSPTSNHSPTSCPPICPGYRWMCLRRFIIFLFILLLCLIFLLVLLDYQGMLPVCPLLPGTSTTSTGPCKTCTIPAQGTSMFPSCCCTKPSDGNCTCIPIPSSWAFARFLWEWASVRFSWLSLLVPFVQWFVGLSPTVWLSVIWMMWYWGPSLYNILSPFLPLLPIFFCLWVYI

SEQ ID NO: 290 - protein, 1638 aa, synthetic construct
  REGION 1..1638: note = Recombinant Sequence
MFVFLVLLPLVSSQCVNFTTRTQLPPAYTNSFTRGVYYPDKVFRSSVLHSTQDLFLPFFSNVTWFHAIHVSGTNGTKRFDNPVLPFNDGVYFASTEKSNIIRGWIFGTTLDSKTQSLLIVNNATNVVIKVCEFQFCNDPFLGVYYHKNNKSWMESEFRVYSSANNCTFEYVSQPFLMDLEGKQGNFKNLREFVFKNIDGYFKIYSKHTPINLVRDLPQGFSALEPLVDLPIGINITRFQTLLALHRSYLTPGDSSSGWTAGAAAYYVGYLQPRTFLLKYNENGTITDAVDCALDPLSETKCTLKSFTVEKGIYQTSNFRVQPTESIVRFPNITNLCPFGEVFNATRFASVYAWNRKRISNCVADYSVLYNSASFSTFKCYGVSPTKLNDLCFTNVYADSFVIRGDEVRQIAPGQTGKIADYNYKLPDDFTGCVIAWNSNNLDSKVGGNYNYRYRLFRKSNLKPFERDISTEIYQAGSTPCNGVEGFNCYFPLQSYGFQPTYGVGYQPYRVVVLSFELLHAPATVCGPKKSTNLVKNKCVNFNFNGLTGTGVLTESNKKFLPFQQFGRDIADTTDAVRDPQTLEILDITPCSFGGVSVITPGTNTSNQVAVLYQGVNCTEVPVAIHADQLTPTWRVYSTGSNVFQTRAGCLIGVEYVNNSYECDIPIGAGICASYQTQTNSPGSASSVASQSIIAYTMSLGAENSVAYSNNSIAIPTNFTISVTTEILPVSMTKTSVDCTMYICGDSTECSNLLLQYGSFCTQLNRALTGIAVEQDKNTQEVFAQVKQIYKTPPIKYFGGFNFSQILPDPSKPSKRSPIEDLLFNKVTLADAGFIKQYGDCLGDIAARDLICAQKFNGLTVLPPLLTDEMIAQYTSALLAGTITSGWTFGAGPALQIPFPMQMAYRFNGIGVTQNVLYENQKLIANQFNSAIGKIQDSLSSTPSALGKLQDVVNQNAQALNTLVKQLSSNFGAISSVLNDILSRLDPPEAEVQIDRLITGRLQSLQTYVTQQLIRAAEIRASANLAATKMSECVLGQSKRVDFCGKGYHLMSFPQSAPHGVVFLHVTYVPAQEKNFTTAPAICHDGKAHFPREGVFVSNGTHWFVTQRNFYEPQIITTDNTFVSGNCDVVIGIVNNTVYDPLQPELDSFKEELDKYFKNHTSPDVDLGDISGINASVVNIQKEIDRLNEVAKNLNESLIDLQELGKYGSGSGSGSGSGSGSGSGSGSGSGSGSGSGSGSMGGWSSKPRQGMGTNLSVPNPLGFFPDHQLDPAFGANSNNPDWDFNPNKDQWPEANQVGAGAFGPGFTPPHGGLLGWSPQAQGILTTVPAAPPPASTNRQSGRQPTPISPPLRDSHPQAMQWNSTTFHQALLDPRVRGLYFPAGGSSSGTVNPVPTTASPISSIFSRTGDPAPNMENTTSGFLGPLLVLQAGFFLLTRILTIPQSLDSWWTSLNFLGGAPTCPGQNSQSPTSNHSPTSCPPICPGYRWMCLRRFIIFLFILLLCLIFLLVLLDYQGMLPVCPLLPGTSTTSTGPCKTCTIPAQGTSMFPSCCCTKPSDGNCTCIPIPSSWAFARFLWEWASVRFSWLSLLVPFVQWFVGLSPTVWLSVIWMMWYWGPSLYNILSPFLPLLPIFFCLWVYI

SEQ ID NO: 291 - protein, 1638 aa, synthetic construct
  REGION 1..1638: note = Recombinant Sequence
MFVFLVLLPLVSSQCVNLTTRTQLPPAYTNSFTRGVYYPDKVFRSSVLHSTQDLFLPFFSNVTWFHAIHVSGTNGTKRFDNPVLPFNDGVYFASTEKSNIIRGWIFGTTLDSKTQSLLIVNNATNVVIKVCEFQFCNDPFLGVYYHKNNKSWMESEFRVYSSANNCTFEYVSQPFLMDLEGKQGNFKNLREFVFKNIDGYFKIYSKHTPINLVRDLPQGFSALEPLVDLPIGINITRFQTLLALHRSYLTPGDSSSGWTAGAAAYYVGYLQPRTFLLKYNENGTITDAVDCALDPLSETKCTLKSFTVEKGIYQTSNFRVQPTESIVRFPNITNLCPFGEVFNATRFASVYAWNRKRISNCVADYSVLYNSASFSTFKCYGVSPTKLNDLCFTNVYADSFVIRGDEVRQIAPGQTGKIADYNYKLPDDFTGCVIAWNSNNLDSKVGGNYNYLYRLFRKSNLKPFERDISTEIYQAGSTPCNGVEGFNCYFPLQSYGFQPTTGVGYQPYRVVVLSFELLHAPATVCGPKKSTNLVKNKCVNFNFNGLTGTGVLTESNKKFLPFQQFGRDIADTTDAVRDPQTLEILDITPCSFGGVSVITPGTNTSNQVAVLYQDVNCTEVPVAIHADQLTPTWRVYSTGSNVFQTRAGCLIGAEHVNNSYECDIPIGAGICASYQTQTNSPGSASSVASQSIIAYTMSLGAENSVAYSNNSIAIPTNFTISVTTEILPVSMTKTSVDCTMYICGDSTECSNLLLQYGSFCTQLNRALTGIAVEQDKNTQEVFAQVKQIYKTPPIKDFGGFNFSQILPDPSKPSKRSPIEDLLFNKVTLADAGFIKQYGDCLGDIAARDLICAQKFNGLTVLPPLLTDEMIAQYTSALLAGTITSGWTFGAGPALQIPFPMQMAYRFNGIGVTQNVLYENQKLIANQFNSAIGKIQDSLSSTPSALGKLQDVVNQNAQALNTLVKQLSSNFGAISSVLNDILSRLDPPEAEVQIDRLITGRLQSLQTYVTQQLIRAAEIRASANLAATKMSECVLGQSKRVDFCGKGYHLMSFPQSAPHGVVFLHVTYVPAQEKNFTTAPAICHDGKAHFPREGVFVSNGTHWFVTQRNFYEPQIITTDNTFVSGNCDVVIGIVNNTVYDPLQPELDSFKEELDKYFKNHTSPDVDLGDISGINASVVNIQKEIDRLNEVAKNLNESLIDLQELGKYGSGSGSGSGSGSGSGSGSGSGSGSGSGSGSGSMGGWSSKPRQGMGTNLSVPNPLGFFPDHQLDPAFGANSNNPDWDFNPNKDQWPEANQVGAGAFGPGFTPPHGGLLGWSPQAQGILTTVPAAPPPASTNRQSGRQPTPISPPLRDSHPQAMQWNSTTFHQALLDPRVRGLYFPAGGSSSGTVNPVPTTASPISSIFSRTGDPAPNMENTTSGFLGPLLVLQAGFFLLTRILTIPQSLDSWWTSLNFLGGAPTCPGQNSQSPTSNHSPTSCPPICPGYRWMCLRRFIIFLFILLLCLIFLLVLLDYQGMLPVCPLLPGTSTTSTGPCKTCTIPAQGTSMFPSCCCTKPSDGNCTCIPIPSSWAFARFLWEWASVRFSWLSLLVPFVQWFVGLSPTVWLSVIWMMWYWGPSLYNILSPFLPLLPIFFCLWVYI

SEQ ID NO: 292 - protein, 1638 aa, synthetic construct
  REGION 1..1638: note = Recombinant Sequence
MFVFFVLLPLVSSQCVNLTTRTQLPPAYTNSFTRGVYYPDKVFRSSVLHSTQDLFLPFFSNVTWFHAIHVSGTNGTKRFDNPVLPFNDGVYFASIEKSNIIRGWIFGTTLDSKTQSLLIVNNATNVVIKVCEFQFCNDPFLGVYYHKNNKSWMESEFRVYSSANNCTFEYVSQPFLMDLEGKQGNFKNLREFVFKNIDGYFKIYSKHTPINLVRDLPQGFSALEPLVDLPIGINITRFQTLLALHRSYLTPGGSSSGWTAGAAAYYVGYLQPRTFLLKYNENGTITDAVDCALDPLSETKCTLKSFTVEKGIYQTSNFRVQPTESIVRFPNITNLCPFGEVFNATRFASVYAWNRKRISNCVADYSVLYNSASFSTFKCYGVSPTKLNDLCFTNVYADSFVIRGDEVRQIAPGQTGKIADYNYKLPDDFTGCVIAWNSNNLDSKVGGNYNYLYRLFRKSNLKPFERDISTEIYQAGSTPCNGVEGFNCYFPLQSYGFQPTNGVGYQPYRVVVLSFELLHAPATVCGPKKSTNLVKNKCVNFNFNGLTGTGVLTESNKKFLPFQQFGRDIADTTDAVRDPQTLEILDITPCSFGGVSVITPGTNTSNQVAVLYQGVNCTEVPVAIHADQLTPTWRVYSTGSNVFQTRAGCLIGAEHVNNSYECDIPIGAGICASYQTQTNSPGSASSVASQSIIAYTMSLGVENSVAYSNNSIAIPTNFTISVTTEILPVSMTKTSVDCTMYICGDSTECSNLLLQYGSFCTQLNRALTGIAVEQDKNTQEVFAQVKQIYKTPPIKDFGGFNFSQILPDPSKPSKRSPIEDLLFNKVTLADAGFIKQYGDCLGDIAARDLICAQKFNGLTVLPPLLTDEMIAQYTSALLAGTITSGWTFGAGPALQIPFPMQMAYRFNGIGVTQNVLYENQKLIANQFNSAIGKIQDSLSSTPSALGKLQDVVNQNAQALNTLVKQLSSNFGAISSVLNDILSRLDPPEAEVQIDRLITGRLQSLQTYVTQQLIRAAEIRASANLAATKMSECVLGQSKRVDFCGKGYHLMSFPQSAPHGVVFLHVTYVPAQEKNFTTAPAICHDGKAHFPREGVFVSNGTHWFVTQRNFYEPQIITTDNTFVSGNCDVVIGIVNNTVYDPLQPELDSFKEELDKYFKNHTSPDVDLGDISGINASVVNIQKEIDRLNEVAKNLNESLIDLQELGKYGSGSGSGSGSGSGSGSGSGSGSGSGSGSGSGSMGGWSSKPRQGMGTNLSVPNPLGFFPDHQLDPAFGANSNNPDWDFNPNKDQWPEANQVGAGAFGPGFTPPHGGLLGWSPQAQGILTTVPAAPPPASTNRQSGRQPTPISPPLRDSHPQAMQWNSTTFHQALLDPRVRGLYFPAGGSSSGTVNPVPTTASPISSIFSRTGDPAPNMENTTSGFLGPLLVLQAGFFLLTRILTIPQSLDSWWTSLNFLGGAPTCPGQNSQSPTSNHSPTSCPPICPGYRWMCLRRFIIFLFILLLCLIFLLVLLDYQGMLPVCPLLPGTSTTSTGPCKTCTIPAQGTSMFPSCCCTKPSDGNCTCIPIPSSWAFARFLWEWASVRFSWLSLLVPFVQWFVGLSPTVWLSVIWMMWYWGPSLYNILSPFLPLLPIFFCLWVYI

SEQ ID NO: 293 - protein, 1638 aa, synthetic construct
  REGION 1..1638: note = Recombinant Sequence
MFVFLVLLPLVSSQCVNLTTRTQLPPAYTNSFTRGVYYPDKVFRSSVLHSTQDLFLPFFSNVTWFHAIHVSGTNGTKRFDNPVLPFNDGVYFASTEKSNIIRGWIFGTTLDSKTQSLLIVNNATNVVIKVCEFQFCNDPFLSVYYHKNNKSWMESEFRVYSSANNCTFEYVSQPFLMDLVGKQGNFKNLREFVFKNIDGYFKIYSKHTPINLVRDLPQGFSALEPLVDLPIGINITRFQTLLALHRSYLTPGDSSSGWTAGAAAYYVGYLQPRTFLLKYNENGTITDAVDCALDPLSETKCTLKSFTVEKGIYQTSNFRVQPTESIVRFPNITNLCPFGEVFNATRFASVYAWNRKRISNCVADYSVLYNSASFSTFKCYGVSPTKLNDLCFTNVYADSFVIRGDEVRQIAPGQTGKIADYNYKLPDDFTGCVIAWNSNNLDSKVGGNYNYLYRLFRKSNLKPFERDISTEIYQAGSTPCNGVEGFNCYFPLQSYGFQPTNGVGYQPYRVVVLSFELLHAPATVCGPKKSTNLVKNKCVNFNFNGLTGTGVLTESNKKFLPFQQFGRDIADTTDAVRDPQTLEILDITPCSFGGVSVITPGTNTSNQVAVLYQGVNCTEVPVAIHADQLTPTWRVYSTGSNVFQTRAGCLIGAEHVNNSYECDIPIGAGICASYQTHTNSPGSASSVASQSIIAYTMSLGAENSVAYSNNSIAIPTNFTISVTTEILPVSMTKTSVDCTMYICGDSTECSNLLLQYGSFCTQLNRALTGIAVEQDKNTQEVFAQVKQIYKTPPIKDFGGFNFSQILPDPSKPSKRSPIEDLLFNKVTLADAGFIKQYGDCLGDIAARDLICAQKFNGLTVLPPLLTDEMIAQYTSALLAGTITSGWTFGAGPALQIPFPMQMAYRFNGIGVTQNVLYENQKLIANQFNSAIGKIQDSLSSTPSALGKLQDVVNQNAQALNTLVKQLSSNFGAISSVLNDILSRLDPPEAEVQIDRLITGRLQSLQTYVTQQLIRAAEIRASANLAATKMSECVLGQSKRVDFCGKGYHLMSFPQSAPHGVVFLHVTYVPAQEKNFTTAPAICHDGKAHFPREGVFVSNGTHWFVTQRNFYEPQIITTDNTFVSGNCDVVIGIVNNTVYDPLQPELDSFKEELDKYFKNHTSPDVDLGDISGINASVVNIQKEIDRLNEVAKNLNESLIDLQELGKYGSGSGSGSGSGSGSGSGSGSGSGSGSGSGSGSMGGWSSKPRQGMGTNLSVPNPLGFFPDHQLDPAFGANSNNPDWDFNPNKDQWPEANQVGAGAFGPGFTPPHGGLLGWSPQAQGILTTVPAAPPPASTNRQSGRQPTPISPPLRDSHPQAMQWNSTTFHQALLDPRVRGLYFPAGGSSSGTVNPVPTTASPISSIFSRTGDPAPNMENTTSGFLGPLLVLQAGFFLLTRILTIPQSLDSWWTSLNFLGGAPTCPGQNSQSPTSNHSPTSCPPICPGYRWMCLRRFIIFLFILLLCLIFLLVLLDYQGMLPVCPLLPGTSTTSTGPCKTCTIPAQGTSMFPSCCCTKPSDGNCTCIPIPSSWAFARFLWEWASVRFSWLSLLVPFVQWFVGLSPTVWLSVIWMMWYWGPSLYNILSPFLPLLPIFFCLWVYI

SEQ ID NO: 294 - protein, 1638 aa, synthetic construct
  REGION 1..1638: note = Recombinant Sequence
MFVFLVLLPLVSSQCVNLTTRTQLPPAYTNSFTRGVYYPDKVFRSSVLHSTQDLFLPFFSNVTWFHAIHVSGTNGTKRFDNPVLPFNDGVYFASTEKSNIIRGWIFGTTLDSKTQSLLIVNNATNVVIKVCEFQFCNDPFLGVYYHKNNKSWMESEFRVYSSANNCTFEYVSQPFLMDLEGKQGNFKNLREFVFKNIDGYFKIYSKHTPINLVRDLPQGFSALEPLVDLPIGINITRFQTLLALHRSYLTPGDSSSGWTAGAAAYYVGYLQPRTFLLKYNENGTITDAVDCALDPLSETKCTLKSFTVEKGIYQTSNFRVQPTESIVRFPNITNLCPFGEVFNATRFASVYAWNRKRISNCVADYSVLYNSASFSTFKCYGVSPTKLNDLCFTNVYADSFVIRGDEVRQIAPGQTGKIADYNYKLPDDFTGCVIAWNSNNLDSKVGGNYNYLYRLFRKSNLKPFERDISTEIYQAGSTPCNGVKGFNCYFPLQPYGFQPTYGVGYQPYRVVVLSFELLHAPATVCGPKKSTNLVKNKCVNFNFNGLTGTGVLTESNKKFLPFQQFGRDIADTTDAVRDPQTLEILDITPCSFGGVSVITPGTNTSNQVAVLYQGVNCTEVPVAIHADQLTPTWRVYSTGSNVFQTRAGCLIGAEHVNNSYECDIPIGAGICASYQTQTNSHGSASSVASQSIIAYTMSLGAENSVAYSNNSIAIPTNFTISVTTEILPVSMTKTSVDCTMYICGDSTECSNLLLQYGSFCTQLNRALTGIAVEQDKNTQEVFAQVKQIYKTPPIKDFGGFNFSQILPDPSKPSKRSPIEDLLFNKVTLADAGFIKQYGDCLGDIAARDLICAQKFNGLTVLPPLLTDEMIAQYTSALLAGTITSGWTFGAGPALQIPFPMQMAYRFNGIGVTQNVLYENQKLIANQFNSAIGKIQDSLSSTPSALGKLQDVVNQNAQALNTLVKQLSSNFGAISSVLNDILSRLDPPEAEVQIDRLITGRLQSLQTYVTQQLIRAAEIRASANLAATKMSECVLGQSKRVDFCGKGYHLMSFPQSAPHGVVFLHVTYVPAQEKNFTTAPAICHDGKAHFPREGVFVSNGTHWFVTQRNFYKPQIITTDNTFVSGNCDVVIGIVNNTVYDPLQPELDSFKEELDKYFKNHTSPDVDLGDISGINASVVNIQKEIDRLNEVAKNLNESLIDLQELGKYGSGSGSGSGSGSGSGSGSGSGSGSGSGSGSGSMGGWSSKPRQGMGTNLSVPNPLGFFPDHQLDPAFGANSNNPDWDFNPNKDQWPEANQVGAGAFGPGFTPPHGGLLGWSPQAQGILTTVPAAPPPASTNRQSGRQPTPISPPLRDSHPQAMQWNSTTFHQALLDPRVRGLYFPAGGSSSGTVNPVPTTASPISSIFSRTGDPAPNMENTTSGFLGPLLVLQAGFFLLTRILTIPQSLDSWWTSLNFLGGAPTCPGQNSQSPTSNHSPTSCPPICPGYRWMCLRRFIIFLFILLLCLIFLLVLLDYQGMLPVCPLLPGTSTTSTGPCKTCTIPAQGTSMFPSCCCTKPSDGNCTCIPIPSSWAFARFLWEWASVRFSWLSLLVPFVQWFVGLSPTVWLSVIWMMWYWGPSLYNILSPFLPLLPIFFCLWVYI

SEQ ID NO: 295 - protein, 1637 aa, synthetic construct
  REGION 1..1637: note = Recombinant Sequence
MFVFLVLLPLVSSQCVNLTTRTQLPPAYTNSFTRGVYYPDKVFRSSVLHSTQDLFLPFFSNVTWFDAIHVSGTNGTKRFDNPVLPFNDGVYFASTEKSNIIRGWIFGTTLDSKTQSLLIVNNATNVVIKVCEFQFCNDPFLVVYHKNNKSWMESEFRVYSSANNCTFEYVSQPFLMDLEGKQGNFKNLREFVFKNIDGYFKIYSKHTPINLVRGLPQGFSALEPLVDLPIGINITRFQTLLALHRSYLTPGDSSSGWTAGAAAYYVGYLQPRTFLLKYNENGTITDAVDCALDPLSETKCTLKSFTVEKGIYQTSNFRVQPTESIVRFPNITNLCPFGEVFNATRFASVYAWNRKRISNCVADYSVLYNSASFSTFKCYGVSPTKLNDLCFTNVYADSFVIRGDEVRQIAPGQTGKIADYNYKLPDDFTGCVIAWNSNNLDSKVGGNYNYLYRLFRKSNLKPFERDISTEIYQAGSTPCNGAEGFNCYFPLQSYGFQPTNGVGYQPYRVVVLSFELLHAPATVCGPKKSTNLVKNKCVNFNFNGLTGTGVLTESNKKFLPFQQFGRDIADTTDAVRDPQTLEILDITPCSFGGVSVITPGTNTSNQVAVLYQDVNCTEVPVAIHADQLTPTWRVYSTGSNVFQTRAGCLIGAEYVNNSYECDIPIGASICASYQTQTNSPGSASSVASQSIIAYTMSLGAENSVAYSNNSIAIPTNFTISVTTEILPVSMTKTSVDCTMYICGDSTECSNLLLQYGSFCTQLNRALTGIAVEQDKNTQEVFAQVKQIYKTPPIKDFGGFNFSQILPDPSKPSKRSPIEDLLFNKVTLADAGFIKQYGDCLGDIAARDLICAQKFNGLTVLPPLLTDEMIAQYTSALLAGTITSGWTFGAGPALQIPFPMQMAYRFNGIGVTQNVLYENQKLIANQFNSAIGKIQDSLSSTPSALGKLRDVVNQNAQALNTLVKQLSSNFGAISSVLNDILSRLDPPEAEVQIDRLITGRLQSLQTYVTQQLIRAAEIRASANLAATKMSECVLGQSKRVDFCGKGYHLMSFPQSAPHGVVFLHVTYVPAQEKNFTTAPAICHDGKDHFPREGVFVSNGTHWFVTQRNFYEPQIITTDNTFVSGNCDVVIGIVNNTVYDPLQPELDSFKEELDKYFKNHTSPDVDLGDISGINASVVNIQKEIDRLNEVAKNLNESLIDLQELGKYGSGSGSGSGSGSGSGSGSGSGSGSGSGSGSGSMGGWSSKPRQGMGTNLSVPNPLGFFPDHQLDPAFGANSNNPDWDFNPNKDQWPEANQVGAGAFGPGFTPPHGGLLGWSPQAQGILTTVPAAPPPASTNRQSGRQPTPISPPLRDSHPQAMQWNSTTFHQALLDPRVRGLYFPAGGSSSGTVNPVPTTASPISSIFSRTGDPAPNMENTTSGFLGPLLVLQAGFFLLTRILTIPQSLDSWWTSLNFLGGAPTCPGQNSQSPTSNHSPTSCPPICPGYRWMCLRRFIIFLFILLLCLIFLLVLLDYQGMLPVCPLLPGTSTTSTGPCKTCTIPAQGTSMFPSCCCTKPSDGNCTCIPIPSSWAFARFLWEWASVRFSWLSLLVPFVQWFVGLSPTVWLSVIWMMWYWGPSLYNILSPFLPLLPIFFCLWVYI

SEQ ID NO: 296 - protein, 1638 aa, synthetic construct
  REGION 1..1638: note = Recombinant Sequence
MFVFLVLLPLVSSQCVNLTTRTQLPPAYTNSFTRGVYYPDKVFRSSVLHSTQDLFLPFFSNVTWFHAIHVSGTNGTKRFDNPVLPFNDGVYFASTEKSNIIRGWIFGTTLDSKTQSLLIVNNATNVVIKVCEFQFCNDPFLGVYYHKNNKSWMESEFRVYSSANNCTFEYVSQPFLMDLEGKQGNFKNLREFVFKNIDGYFKIYSKHTPINLVRDLPQGFSALEPLVDLPIGINITRFQTLLALHRSYLTPGDSSSGWTAGAAAYYVGYLQPRTFLLKYNENGTITDAVDCALDPLSETKCTLKSFTVEKGIYQTSNFRVQPTESIVRFPNITNLCPFGEVFNATRFASVYAWNRKRISNCVADYSVLYNSASFSTFKCYGVSPTKLNDLCFTNVYADSFVIRGDEVRQIAPGQTGKIADYNYKLPDDFTGCVIAWNSNNLDSKVGGNYNYLYRLFRKSNLKPFERDISTEIYQAGSTPCNGVEGFNCYFPLQPYGFQPTNGVGYQPYRVVVLSFELLHAPATVCGPKKSTNLVKNKCVNFNFNGLTGTGVLTESNKKFLPFQQFGRDIADTTDAVRDPQTLEILDITPCSFGGVSVITPGTNTSNQVAVLYQGVNCTEVPVAIHADQLTPTWRVYSTGSNVFQTRAGCLIGAEHVNNSYECDIPIGAGICASYQTQTNSHGSASSVASQSIIAYTMSLGAENSVAYSNNSIAIPINFTISVTTEILPVSMTKTSVDCTMYICGDSTECSNLLLQYGSFCTQLNRALTGIAVEQDKNTQEVFAQVKQIYKTPPIKDFGGFNFSQILPDPSKPSKRSPIEDLLFNKVTLADAGFIKQYGDCLGDIAARDLICAQKFNGLTVLPPLLTDEMIAQYTSALLAGTITSGWTFGAGPALQIPFPMQMAYRFNGIGVTQNVLYENQKLIANQFNSAIGKIQDSLSSTPSALGKLQDVVNQNAQALNTLVKQLSSNFGAISSVLNDILSRLDPPEAEVQIDRLITGRLQSLQTYVTQQLIRAAEIRASANLAATKMSECVLGQSKRVDFCGKGYHLMSFPQSAPHGVVFLHVTYVPAQEKNFTTAPAICHDGKAHFPREGVFVSNGTHWFVTQRNFYEPQIITTDNTFVSGNCDVVIGIVNNTVYDPLQPELDSFKEELDKYFKNHTSPDVDLGDISGINASVVNIQKEIDRLNEVAKNLNESLIDLQELGKYGSGSGSGSGSGSGSGSGSGSGSGSGSGSGSGSMGGWSSKPRQGMGTNLSVPNPLGFFPDHQLDPAFGANSNNPDWDFNPNKDQWPEANQVGAGAFGPGFTPPHGGLLGWSPQAQGILTTVPAAPPPASTNRQSGRQPTPISPPLRDSHPQAMQWNSTTFHQALLDPRVRGLYFPAGGSSSGTVNPVPTTASPISSIFSRTGDPAPNMENTTSGFLGPLLVLQAGFFLLTRILTIPQSLDSWWTSLNFLGGAPTCPGQNSQSPTSNHSPTSCPPICPGYRWMCLRRFIIFLFILLLCLIFLLVLLDYQGMLPVCPLLPGTSTTSTGPCKTCTIPAQGTSMFPSCCCTKPSDGNCTCIPIPSSWAFARFLWEWASVRFSWLSLLVPFVQWFVGLSPTVWLSVIWMMWYWGPSLYNILSPFLPLLPIFFCLWVYI

SEQ ID NO: 297 - protein, 1430 aa, synthetic construct
  REGION 1..1430: note = Recombinant Sequence
MFIFLLFLTLTSGSDLDRCTTFDDVQAPNYTQHTSSMRGVYYPDEIFRSDTLYLTQDLFLPFYSNVTGFHTINHTFGNPVIPFKDGIYFAATEKSNVVRGWVFGSTMNNKSQSVIIINNSTNVVIRACNFELCDNPFFAVSKPMGTQTHTMIFDNAFNCTFEYISDAFSLDVSEKSGNFKHLREFVFKNKDGFLYVYKGYQPIDVVRDLPSGFNTLKPIFKLPLGINITNFRAILTAFSPAQDIWGTSAAAYFVGYLKPTTFMLKYDENGTITDAVDCSQNPLAELKCSVKSFEIDKGIYQTSNFRVVPSGDVVRFPNITNLCPFGEVFNATKFPSVYAWERKKISNCVADYSVLYNSTFFSTFKCYGVSATKLNDLCFSNVYADSFVVKGDDVRQIAPGQTGVIADYNYKLPDDFMGCVLAWNTRNIDATSTGNYNYKYRYLRHGKLRPFERDISNVPFSPDGKPCTPPALNCYWPLNDYGFYTTTGIGYQPYRVVVLSFELLNAPATVCGPKLSTDLIKNQCVNFNFNGLTGTGVLTPSSKRFQPFQQFGRDVSDFTDSVRDPKTSEILDISPCAFGGVSVITPGTNASSEVAVLYQDVNCTNVSAAIHADQLTPAWRIYSTGNNVFQTQAGCLIGAEHVDTSYECDIPIGAGICASYHTVSLLSSTSQKSIVAYTMSLGADSSIAYSNNTIAIPTNFSISITTEVMPVSMAKTSVDCNMYICGDSTECANLLLQYGSFCTQLNRALSGIAAEQDRNTREVFAQVKQMYKTPTLKYFGGFNFSQILPDPLKPTKRSPIEDLLFNKVTLADAGFMKQYGECLGDINARDLICAQKFNGLTVLPPLLTDDMIAAYTAALVSGTATAGWTFGAGPALQIPFPMQMAYRFNGIGVTQNVLYENQKQIANQFNKAISQIQESLTTTPTALGKLQDVVNQNAQALNTLVKQLSSNFGAISSVLNDILSRLDPPEAEVQIDRLITGRLQSLQTYVTQQLIRAAEIRASANLAATKMSECVLGQSKRVDFCGKGYHLMSFPQAAPHGVVFLHVTYVPSQERNFTTAPAICHEGKAYFPREGVFVFNGTSWFITQRNFFSPQIITTDNTFVSGNCDVVIGIINNTVYDPLQPELDSFKGELDKYFKNHTSPDVDLGDISGINASVVNIQKEIDRLNEVAKNLNESLIDLQELGKYGSGSGSGSGSGSGSGSMENTTSGFLGPLLVLQAGFFLLTRILTIPQSLDSWWTSLNFLGGAPTCPGQNSRSPTSNHSPTSCPPICPGYRWMCLRRFIIFLFILLLCLIFLLVLLDYQGMLPVCPLLPGTSTTSTGPCKTCTNPANGTSMFPSCCCTKPSDGNCTCIPIPSSWAFARFLWEWASVRFSWLSFLVPFVQWFVGLSPTVWLSVMWMMWYWGPSLYNILSPFLPLLPIFFCLWVYI

SEQ ID NO: 298 - protein, 1533 aa, synthetic construct
  REGION 1..1533: note = Recombinant Sequence
MIHSVFLLMFLLTPTESYVDVGPDSVKSACIEVDIQQTFFDKTWPRPIDVSKADGIIYPQGRTYSNITITYQGLFPYQGDHGDMYVYSAGHATGTTPQKLFVANYSQDVKQFANGFVVRIGAAANSTGTVIISPSTSATIRKIYPAFMLGSSVGNFSDGKMGRFFNHTLVLLPDGCGTLLRAFYCILEPRSGNHCPAGNSYTSFATYHTPATDCSDGNYNRNASLNSFKEYFNLRNCTFMYTYNITEDEILEWFGITQTAQGVHLFSSRYVDLYGGNMFQFATLPVYDTIKYYSIIPHSIRSIQSDRKAWAAFYVYKLQPLTFLLDFSVDGYIRRAIDCGFNDLSQLHCSYESFDVESGVYSVSSFEAKPSGSVVEQAEGVECDFSPLLSGTPPQVYNFKRLVFTNCNYNLTKLLSLFSVNDFTCSQISPAAIASNCYSSLILDYFSYPLSMKSDLSVSSAGPISQFNYKQSFSNPTCLILATVPHNLTTITKPLKYSYINKCSRLLSDDRTEVPQLVNANQYSPCVSIVPSTVWEDGDYYRKQLSPLEGGGWLVASGSTVAMTEQLQMGFGITVQYGTDTNSVCPKLEFANDTKIASQLGNCVEYSLYGVSGRGVFQNCTAVGVRQQRFVYDAYQNLVGYYSDDGNYYCLRACVSVPVSVIYDKETKTHATLFGSVACEHISSTMSQYSRSTRSMLKRRDSTYGPLQTPVGCVLGLVNSSLFVEDCKLPLGQSLCALPDTPSTLTPASVGSVPGEMRLASIAFNHPIQVDQLNSSYFKLSIPTNFSFGVTQEYIQTTIQKVTVDCKQYVCNGFQKCEQLLREYGQFCSKINQALHGANLRQDDSVRNLFASVKSSQSSPIIPGFGGDFNLTLLEPVSISTGSASAPSAIEDLLFDKVTIADPGYMQGYDDCMQQGPASARDLICAQYVAGYKVLPPLMDVNMEAAYTSSLLGSIAGVGWPAGLSSFAAPPFAQSIFYRLNGVGITQQVLSENQKLIANKFNQALGAMQTGFTTTPEAFQKVQDAVNNNAQALSKLASELSNTFGAISASIGDIIQRLDPPEQDAQIDRLINGRLTTLNAFVAQQLVRSESAALSAQLAKDKVNECVKAQSKRSGFCGQGTHIVSFVVNAPNGLYFMHVGYYPSNHIEVVSAYGLCDAANPTNCIAPVNGYFIKTNNTRIVDEWSYTGSSFYAPEPITSLNTKYVAPQVTYQNISTNLPPPLLGNSTGIDFQDELDEFFKNVSTSIPNFGSLTQINTTLLDLTYEMLSLQQVVKALNESYIDLKELGNYTYGSGSGSGSGSGSGSGSMENTTSGFLGPLLVLQAGFFLLTRILTIPQSLDSWWTSLNFLGGAPTCPGQNSRSPTSNHSPTSCPPICPGYRWMCLRRFIIFLFILLLCLIFLLVLLDYQGMLPVCPLLPGTSTTSTGPCKTCTNPANGTSMFPSCCCTKPSDGNCTCIPIPSSWAFARFLWEWASVRFSWLSFLVPFVQWFVGLSPTVWLSVMWMMWYWGPSLYNILSPFLPLLPIFFCLWVYI

SEQ ID NO: 299 - protein, 1438 aa, synthetic construct
  REGION 1..1438: note = Recombinant Sequence
MFIFLLFLTLTSGSDLDRCTTFDDVQAPNYTQHTSSMRGVYYPDEIFRSDTLYLTQDLFLPFYSNVTGFHTINHTFGNPVIPFKDGIYFAATEKSNVVRGWVFGSTMNNKSQSVIIINNSTNVVIRACNFELCDNPFFAVSKPMGTQTHTMIFDNAFNCTFEYISDAFSLDVSEKSGNFKHLREFVFKNKDGFLYVYKGYQPIDVVRDLPSGFNTLKPIFKLPLGINITNFRAILTAFSPAQDIWGTSAAAYFVGYLKPTTFMLKYDENGTITDAVDCSQNPLAELKCSVKSFEIDKGIYQTSNFRVVPSGDVVRFPNITNLCPFGEVFNATKFPSVYAWERKKISNCVADYSVLYNSTFFSTFKCYGVSATKLNDLCFSNVYADSFVVKGDDVRQIAPGQTGVIADYNYKLPDDFMGCVLAWNTRNIDATSTGNYNYKYRYLRHGKLRPFERDISNVPFSPDGKPCTPPALNCYWPLNDYGFYTTTGIGYQPYRVVVLSFELLNAPATVCGPKLSTDLIKNQCVNFNFNGLTGTGVLTPSSKRFQPFQQFGRDVSDFTDSVRDPKTSEILDISPCAFGGVSVITPGTNASSEVAVLYQDVNCTNVSAAIHADQLTPAWRIYSTGNNVFQTQAGCLIGAEHVDTSYECDIPIGAGICASYHTVSLLSSTSQKSIVAYTMSLGADSSIAYSNNTIAIPTNFSISITTEVMPVSMAKTSVDCNMYICGDSTECANLLLQYGSFCTQLNRALSGIAAEQDRNTREVFAQVKQMYKTPTLKYFGGFNFSQILPDPLKPTKRSPIEDLLFNKVTLADAGFMKQYGECLGDINARDLICAQKFNGLTVLPPLLTDDMIAAYTAALVSGTATAGWTFGAGPALQIPFPMQMAYRFNGIGVTQNVLYENQKQIANQFNKAISQIQESLTTTPTALGKLQDVVNQNAQALNTLVKQLSSNFGAISSVLNDILSRLDPPEAEVQIDRLITGRLQSLQTYVTQQLIRAAEIRASANLAATKMSECVLGQSKRVDFCGKGYHLMSFPQAAPHGVVFLHVTYVPSQERNFTTAPAICHEGKAYFPREGVFVFNGTSWFITQRNFFSPQIITTDNTFVSGNCDVVIGIINNTVYDPLQPELDSFKGELDKYFKNHTSPDVDLGDISGINASVVNIQKEIDRLNEVAKNLNESLIDLQELGKYGSGSGSGSGSGSGSGSGSGSGSGSMENTTSGFLGPLLVLQAGFFLLTRILTIPQSLDSWWTSLNFLGGAPTCPGQNSRSPTSNHSPTSCPPICPGYRWMCLRRFIIFLFILLLCLIFLLVLLDYQGMLPVCPLLPGTSTTSTGPCKTCTNPANGTSMFPSCCCTKPSDGNCTCIPIPSSWAFARFLWEWASVRFSWLSFLVPFVQWFVGLSPTVWLSVMWMMWYWGPSLYNILSPFLPLLPIFFCLWVYI

SEQ ID NO: 300 - protein, 1541 aa, synthetic construct
  REGION 1..1541: note = Recombinant Sequence
MIHSVFLLMFLLTPTESYVDVGPDSVKSACIEVDIQQTFFDKTWPRPIDVSKADGIIYPQGRTYSNITITYQGLFPYQGDHGDMYVYSAGHATGTTPQKLFVANYSQDVKQFANGFVVRIGAAANSTGTVIISPSTSATIRKIYPAFMLGSSVGNFSDGKMGRFFNHTLVLLPDGCGTLLRAFYCILEPRSGNHCPAGNSYTSFATYHTPATDCSDGNYNRNASLNSFKEYFNLRNCTFMYTYNITEDEILEWFGITQTAQGVHLFSSRYVDLYGGNMFQFATLPVYDTIKYYSIIPHSIRSIQSDRKAWAAFYVYKLQPLTFLLDFSVDGYIRRAIDCGFNDLSQLHCSYESFDVESGVYSVSSFEAKPSGSVVEQAEGVECDFSPLLSGTPPQVYNFKRLVFTNCNYNLTKLLSLFSVNDFTCSQISPAAIASNCYSSLILDYFSYPLSMKSDLSVSSAGPISQFNYKQSFSNPTCLILATVPHNLTTITKPLKYSYINKCSRLLSDDRTEVPQLVNANQYSPCVSIVPSTVWEDGDYYRKQLSPLEGGGWLVASGSTVAMTEQLQMGFGITVQYGTDTNSVCPKLEFANDTKIASQLGNCVEYSLYGVSGRGVFQNCTAVGVRQQRFVYDAYQNLVGYYSDDGNYYCLRACVSVPVSVIYDKETKTHATLFGSVACEHISSTMSQYSRSTRSMLKRRDSTYGPLQTPVGCVLGLVNSSLFVEDCKLPLGQSLCALPDTPSTLTPASVGSVPGEMRLASIAFNHPIQVDQLNSSYFKLSIPTNFSFGVTQEYIQTTIQKVTVDCKQYVCNGFQKCEQLLREYGQFCSKINQALHGANLRQDDSVRNLFASVKSSQSSPIIPGFGGDFNLTLLEPVSISTGSASAPSAIEDLLFDKVTIADPGYMQGYDDCMQQGPASARDLICAQYVAGYKVLPPLMDVNMEAAYTSSLLGSIAGVGWPAGLSSFAAPPFAQSIFYRLNGVGITQQVLSENQKLIANKFNQALGAMQTGFTTTPEAFQKVQDAVNNNAQALSKLASELSNTFGAISASIGDIIQRLDPPEQDAQIDRLINGRLTTLNAFVAQQLVRSESAALSAQLAKDKVNECVKAQSKRSGFCGQGTHIVSFVVNAPNGLYFMHVGYYPSNHIEVVSAYGLCDAANPTNCIAPVNGYFIKTNNTRIVDEWSYTGSSFYAPEPITSLNTKYVAPQVTYQNISTNLPPPLLGNSTGIDFQDELDEFFKNVSTSIPNFGSLTQINTTLLDLTYEMLSLQQVVKALNESYIDLKELGNYTYGSGSGSGSGSGSGSGSGSGSGSGSMENTTSGFLGPLLVLQAGFFLLTRILTIPQSLDSWWTSLNFLGGAPTCPGQNSRSPTSNHSPTSCPPICPGYRWMCLRRFIIFLFILLLCLIFLLVLLDYQGMLPVCPLLPGTSTTSTGPCKTCTNPANGTSMFPSCCCTKPSDGNCTCIPIPSSWAFARFLWEWASVRFSWLSFLVPFVQWFVGLSPTVWLSVMWMMWYWGPSLYNILSPFLPLLPIFFCLWVYI

SEQ ID NO: 301 - protein, 1446 aa, synthetic construct
  REGION 1..1446: note = Recombinant Sequence
MFIFLLFLTLTSGSDLDRCTTFDDVQAPNYTQHTSSMRGVYYPDEIFRSDTLYLTQDLFLPFYSNVTGFHTINHTFGNPVIPFKDGIYFAATEKSNVVRGWVFGSTMNNKSQSVIIINNSTNVVIRACNFELCDNPFFAVSKPMGTQTHTMIFDNAFNCTFEYISDAFSLDVSEKSGNFKHLREFVFKNKDGFLYVYKGYQPIDVVRDLPSGFNTLKPIFKLPLGINITNFRAILTAFSPAQDIWGTSAAAYFVGYLKPTTFMLKYDENGTITDAVDCSQNPLAELKCSVKSFEIDKGIYQTSNFRVVPSGDVVRFPNITNLCPFGEVFNATKFPSVYAWERKKISNCVADYSVLYNSTFFSTFKCYGVSATKLNDLCFSNVYADSFVVKGDDVRQIAPGQTGVIADYNYKLPDDFMGCVLAWNTRNIDATSTGNYNYKYRYLRHGKLRPFERDISNVPFSPDGKPCTPPALNCYWPLNDYGFYTTTGIGYQPYRVVVLSFELLNAPATVCGPKLSTDLIKNQCVNFNFNGLTGTGVLTPSSKRFQPFQQFGRDVSDFTDSVRDPKTSEILDISPCAFGGVSVITPGTNASSEVAVLYQDVNCTNVSAAIHADQLTPAWRIYSTGNNVFQTQAGCLIGAEHVDTSYECDIPIGAGICASYHTVSLLSSTSQKSIVAYTMSLGADSSIAYSNNTIAIPTNFSISITTEVMPVSMAKTSVDCNMYICGDSTECANLLLQYGSFCTQLNRALSGIAAEQDRNTREVFAQVKQMYKTPTLKYFGGFNFSQILPDPLKPTKRSPIEDLLFNKVTLADAGFMKQYGECLGDINARDLICAQKFNGLTVLPPLLTDDMIAAYTAALVSGTATAGWTFGAGPALQIPFPMQMAYRFNGIGVTQNVLYENQKQIANQFNKAISQIQESLTTTPTALGKLQDVVNQNAQALNTLVKQLSSNFGAISSVLNDILSRLDPPEAEVQIDRLITGRLQSLQTYVTQQLIRAAEIRASANLAATKMSECVLGQSKRVDFCGKGYHLMSFPQAAPHGVVFLHVTYVPSQERNFTTAPAICHEGKAYFPREGVFVFNGTSWFITQRNFFSPQIITTDNTFVSGNCDVVIGIINNTVYDPLQPELDSFKGELDKYFKNHTSPDVDLGDISGINASVVNIQKEIDRLNEVAKNLNESLIDLQELGKYGSGSGSGSGSGSGSGSGSGSGSGSGSGSGSGSMENTTSGFLGPLLVLQAGFFLLTRILTIPQSLDSWWTSLNFLGGAPTCPGQNSRSPTSNHSPTSCPPICPGYRWMCLRRFIIFLFILLLCLIFLLVLLDYQGMLPVCPLLPGTSTTSTGPCKTCTNPANGTSMFPSCCCTKPSDGNCTCIPIPSSWAFARFLWEWASVRFSWLSFLVPFVQWFVGLSPTVWLSVMWMMWYWGPSLYNILSPFLPLLPIFFCLWVYI

SEQ ID NO: 302 - protein, 1549 aa, synthetic construct
  REGION 1..1549: note = Recombinant Sequence
MIHSVFLLMFLLTPTESYVDVGPDSVKSACIEVDIQQTFFDKTWPRPIDVSKADGIIYPQGRTYSNITITYQGLFPYQGDHGDMYVYSAGHATGTTPQKLFVANYSQDVKQFANGFVVRIGAAANSTGTVIISPSTSATIRKIYPAFMLGSSVGNFSDGKMGRFFNHTLVLLPDGCGTLLRAFYCILEPRSGNHCPAGNSYTSFATYHTPATDCSDGNYNRNASLNSFKEYFNLRNCTFMYTYNITEDEILEWFGITQTAQGVHLFSSRYVDLYGGNMFQFATLPVYDTIKYYSIIPHSIRSIQSDRKAWAAFYVYKLQPLTFLLDFSVDGYIRRAIDCGFNDLSQLHCSYESFDVESGVYSVSSFEAKPSGSVVEQAEGVECDFSPLLSGTPPQVYNFKRLVFTNCNYNLTKLLSLFSVNDFTCSQISPAAIASNCYSSLILDYFSYPLSMKSDLSVSSAGPISQFNYKQSFSNPTCLILATVPHNLTTITKPLKYSYINKCSRLLSDDRTEVPQLVNANQYSPCVSIVPSTVWEDGDYYRKQLSPLEGGGWLVASGSTVAMTEQLQMGFGITVQYGTDTNSVCPKLEFANDTKIASQLGNCVEYSLYGVSGRGVFQNCTAVGVRQQRFVYDAYQNLVGYYSDDGNYYCLRACVSVPVSVIYDKETKTHATLFGSVACEHISSTMSQYSRSTRSMLKRRDSTYGPLQTPVGCVLGLVNSSLFVEDCKLPLGQSLCALPDTPSTLTPASVGSVPGEMRLASIAFNHPIQVDQLNSSYFKLSIPTNFSFGVTQEYIQTTIQKVTVDCKQYVCNGFQKCEQLLREYGQFCSKINQALHGANLRQDDSVRNLFASVKSSQSSPIIPGFGGDFNLTLLEPVSISTGSASAPSAIEDLLFDKVTIADPGYMQGYDDCMQQGPASARDLICAQYVAGYKVLPPLMDVNMEAAYTSSLLGSIAGVGWPAGLSSFAAPPFAQSIFYRLNGVGITQQVLSENQKLIANKFNQALGAMQTGFTTTPEAFQKVQDAVNNNAQALSKLASELSNTFGAISASIGDIIQRLDPPEQDAQIDRLINGRLTTLNAFVAQQLVRSESAALSAQLAKDKVNECVKAQSKRSGFCGQGTHIVSFVVNAPNGLYFMHVGYYPSNHIEVVSAYGLCDAANPTNCIAPVNGYFIKTNNTRIVDEWSYTGSSFYAPEPITSLNTKYVAPQVTYQNISTNLPPPLLGNSTGIDFQDELDEFFKNVSTSIPNFGSLTQINTTLLDLTYEMLSLQQVVKALNESYIDLKELGNYTYGSGSGSGSGSGSGSGSGSGSGSGSGSGSGSGSMENTTSGFLGPLLVLQAGFFLLTRILTIPQSLDSWWTSLNFLGGAPTCPGQNSRSPTSNHSPTSCPPICPGYRWMCLRRFIIFLFILLLCLIFLLVLLDYQGMLPVCPLLPGTSTTSTGPCKTCTNPANGTSMFPSCCCTKPSDGNCTCIPIPSSWAFARFLWEWASVRFSWLSFLVPFVQWFVGLSPTVWLSVMWMMWYWGPSLYNILSPFLPLLPIFFCLWVYI

SEQ ID NO: 303 - protein, 1485 aa, synthetic construct
  REGION 1..1485: note = Recombinant Sequence
MFIFLLFLTLTSGSDLDRCTTFDDVQAPNYTQHTSSMRGVYYPDEIFRSDTLYLTQDLFLPFYSNVTGFHTINHTFGNPVIPFKDGIYFAATEKSNVVRGWVFGSTMNNKSQSVIIINNSTNVVIRACNFELCDNPFFAVSKPMGTQTHTMIFDNAFNCTFEYISDAFSLDVSEKSGNFKHLREFVFKNKDGFLYVYKGYQPIDVVRDLPSGFNTLKPIFKLPLGINITNFRAILTAFSPAQDIWGTSAAAYFVGYLKPTTFMLKYDENGTITDAVDCSQNPLAELKCSVKSFEIDKGIYQTSNFRVVPSGDVVRFPNITNLCPFGEVFNATKFPSVYAWERKKISNCVADYSVLYNSTFFSTFKCYGVSATKLNDLCFSNVYADSFVVKGDDVRQIAPGQTGVIADYNYKLPDDFMGCVLAWNTRNIDATSTGNYNYKYRYLRHGKLRPFERDISNVPFSPDGKPCTPPALNCYWPLNDYGFYTTTGIGYQPYRVVVLSFELLNAPATVCGPKLSTDLIKNQCVNFNFNGLTGTGVLTPSSKRFQPFQQFGRDVSDFTDSVRDPKTSEILDISPCAFGGVSVITPGTNASSEVAVLYQDVNCTNVSAAIHADQLTPAWRIYSTGNNVFQTQAGCLIGAEHVDTSYECDIPIGAGICASYHTVSLLSSTSQKSIVAYTMSLGADSSIAYSNNTIAIPTNFSISITTEVMPVSMAKTSVDCNMYICGDSTECANLLLQYGSFCTQLNRALSGIAAEQDRNTREVFAQVKQMYKTPTLKYFGGFNFSQILPDPLKPTKRSPIEDLLFNKVTLADAGFMKQYGECLGDINARDLICAQKFNGLTVLPPLLTDDMIAAYTAALVSGTATAGWTFGAGPALQIPFPMQMAYRFNGIGVTQNVLYENQKQIANQFNKAISQIQESLTTTPTALGKLQDVVNQNAQALNTLVKQLSSNFGAISSVLNDILSRLDPPEAEVQIDRLITGRLQSLQTYVTQQLIRAAEIRASANLAATKMSECVLGQSKRVDFCGKGYHLMSFPQAAPHGVVFLHVTYVPSQERNFTTAPAICHEGKAYFPREGVFVFNGTSWFITQRNFFSPQIITTDNTFVSGNCDVVIGIINNTVYDPLQPELDSFKGELDKYFKNHTSPDVDLGDISGINASVVNIQKEIDRLNEVAKNLNESLIDLQELGKYGSGSGSGSGSGSGSGSMQWNSSTFHQALLDPRVRGLYFPAGGSSSGTVNPVPTTASPISSIFSRTGDPAPNMESTTSGFLGPLLALQAGFFLLTRILTIPQSLDSWWTSLNFLGGAPTCPGQNLQSPTSNHSPTSCPPICPGYRWMCLRRFIIFLFILLLCLIFLLVLLDYQGMLPVCPLLPGTSTTSTGPCKTCTIPAQGTSMFPSCCCTKPSDGNCTCIPIPSSWAFARFLWEWASVRFSWLSLLVPFVQWFVGLSPTVWLSVIWMMWYWGPSLYNILNPFLPLLPIFFCLWVYI

SEQ ID NO: 304 - protein, 1588 aa, synthetic construct
  REGION 1..1588: note = Recombinant Sequence
MIHSVFLLMFLLTPTESYVDVGPDSVKSACIEVDIQQTFFDKTWPRPIDVSKADGIIYPQGRTYSNITITYQGLFPYQGDHGDMYVYSAGHATGTTPQKLFVANYSQDVKQFANGFVVRIGAAANSTGTVIISPSTSATIRKIYPAFMLGSSVGNFSDGKMGRFFNHTLVLLPDGCGTLLRAFYCILEPRSGNHCPAGNSYTSFATYHTPATDCSDGNYNRNASLNSFKEYFNLRNCTFMYTYNITEDEILEWFGITQTAQGVHLFSSRYVDLYGGNMFQFATLPVYDTIKYYSIIPHSIRSIQSDRKAWAAFYVYKLQPLTFLLDFSVDGYIRRAIDCGFNDLSQLHCSYESFDVESGVYSVSSFEAKPSGSVVEQAEGVECDFSPLLSGTPPQVYNFKRLVFTNCNYNLTKLLSLFSVNDFTCSQISPAAIASNCYSSLILDYFSYPLSMKSDLSVSSAGPISQFNYKQSFSNPTCLILATVPHNLTTITKPLKYSYINKCSRLLSDDRTEVPQLVNANQYSPCVSIVPSTVWEDGDYYRKQLSPLEGGGWLVASGSTVAMTEQLQMGFGITVQYGTDTNSVCPKLEFANDTKIASQLGNCVEYSLYGVSGRGVFQNCTAVGVRQQRFVYDAYQNLVGYYSDDGNYYCLRACVSVPVSVIYDKETKTHATLFGSVACEHISSTMSQYSRSTRSMLKRRDSTYGPLQTPVGCVLGLVNSSLFVEDCKLPLGQSLCALPDTPSTLTPASVGSVPGEMRLASIAFNHPIQVDQLNSSYFKLSIPTNFSFGVTQEYIQTTIQKVTVDCKQYVCNGFQKCEQLLREYGQFCSKINQALHGANLRQDDSVRNLFASVKSSQSSPIIPGFGGDFNLTLLEPVSISTGSASAPSAIEDLLFDKVTIADPGYMQGYDDCMQQGPASARDLICAQYVAGYKVLPPLMDVNMEAAYTSSLLGSIAGVGWPAGLSSFAAPPFAQSIFYRLNGVGITQQVLSENQKLIANKFNQALGAMQTGFTTTPEAFQKVQDAVNNNAQALSKLASELSNTFGAISASIGDIIQRLDPPEQDAQIDRLINGRLTTLNAFVAQQLVRSESAALSAQLAKDKVNECVKAQSKRSGFCGQGTHIVSFVVNAPNGLYFMHVGYYPSNHIEVVSAYGLCDAANPTNCIAPVNGYFIKTNNTRIVDEWSYTGSSFYAPEPITSLNTKYVAPQVTYQNISTNLPPPLLGNSTGIDFQDELDEFFKNVSTSIPNFGSLTQINTTLLDLTYEMLSLQQVVKALNESYIDLKELGNYTYGSGSGSGSGSGSGSGSMQWNSSTFHQALLDPRVRGLYFPAGGSSSGTVNPVPTTASPISSIFSRTGDPAPNMESTTSGFLGPLLALQAGFFLLTRILTIPQSLDSWWTSLNFLGGAPTCPGQNLQSPTSNHSPTSCPPICPGYRWMCLRRFIIFLFILLLCLIFLLVLLDYQGMLPVCPLLPGTSTTSTGPCKTCTIPAQGTSMFPSCCCTKPSDGNCTCIPIPSSWAFARFLWEWASVRFSWLSLLVPFVQWFVGLSPTVWLSVIWMMWYWGPSLYNILNPFLPLLPIFFCLWVYI

SEQ ID NO: 305 - protein, 1493 aa, synthetic construct
  REGION 1..1493: note = Recombinant Sequence
MFIFLLFLTLTSGSDLDRCTTFDDVQAPNYTQHTSSMRGVYYPDEIFRSDTLYLTQDLFLPFYSNVTGFHTINHTFGNPVIPFKDGIYFAATEKSNVVRGWVFGSTMNNKSQSVIIINNSTNVVIRACNFELCDNPFFAVSKPMGTQTHTMIFDNAFNCTFEYISDAFSLDVSEKSGNFKHLREFVFKNKDGFLYVYKGYQPIDVVRDLPSGFNTLKPIFKLPLGINITNFRAILTAFSPAQDIWGTSAAAYFVGYLKPTTFMLKYDENGTITDAVDCSQNPLAELKCSVKSFEIDKGIYQTSNFRVVPSGDVVRFPNITNLCPFGEVFNATKFPSVYAWERKKISNCVADYSVLYNSTFFSTFKCYGVSATKLNDLCFSNVYADSFVVKGDDVRQIAPGQTGVIADYNYKLPDDFMGCVLAWNTRNIDATSTGNYNYKYRYLRHGKLRPFERDISNVPFSPDGKPCTPPALNCYWPLNDYGFYTTTGIGYQPYRVVVLSFELLNAPATVCGPKLSTDLIKNQCVNFNFNGLTGTGVLTPSSKRFQPFQQFGRDVSDFTDSVRDPKTSEILDISPCAFGGVSVITPGTNASSEVAVLYQDVNCTNVSAAIHADQLTPAWRIYSTGNNVFQTQAGCLIGAEHVDTSYECDIPIGAGICASYHTVSLLSSTSQKSIVAYTMSLGADSSIAYSNNTIAIPTNFSISITTEVMPVSMAKTSVDCNMYICGDSTECANLLLQYGSFCTQLNRALSGIAAEQDRNTREVFAQVKQMYKTPTLKYFGGFNFSQILPDPLKPTKRSPIEDLLFNKVTLADAGFMKQYGECLGDINARDLICAQKFNGLTVLPPLLTDDMIAAYTAALVSGTATAGWTFGAGPALQIPFPMQMAYRFNGIGVTQNVLYENQKQIANQFNKAISQIQESLTTTPTALGKLQDVVNQNAQALNTLVKQLSSNFGAISSVLNDILSRLDPPEAEVQIDRLITGRLQSLQTYVTQQLIRAAEIRASANLAATKMSECVLGQSKRVDFCGKGYHLMSFPQAAPHGVVFLHVTYVPSQERNFTTAPAICHEGKAYFPREGVFVFNGTSWFITQRNFFSPQIITTDNTFVSGNCDVVIGIINNTVYDPLQPELDSFKGELDKYFKNHTSPDVDLGDISGINASVVNIQKEIDRLNEVAKNLNESLIDLQELGKYGSGSGSGSGSGSGSGSGSGSGSGSMQWNSSTFHQALLDPRVRGLYFPAGGSSSGTVNPVPTTASPISSIFSRTGDPAPNMESTTSGFLGPLLALQAGFFLLTRILTIPQSLDSWWTSLNFLGGAPTCPGQNLQSPTSNHSPTSCPPICPGYRWMCLRRFIIFLFILLLCLIFLLVLLDYQGMLPVCPLLPGTSTTSTGPCKTCTIPAQGTSMFPSCCCTKPSDGNCTCIPIPSSWAFARFLWEWASVRFSWLSLLVPFVQWFVGLSPTVWLSVIWMMWYWGPSLYNILNPFLPLLPIFFCLWVYI

SEQ ID NO: 306 - protein, 1596 aa, synthetic construct
  REGION 1..1596: note = Recombinant Sequence
MIHSVFLLMFLLTPTESYVDVGPDSVKSACIEVDIQQTFFDKTWPRPIDVSKADGIIYPQGRTYSNITITYQGLFPYQGDHGDMYVYSAGHATGTTPQKLFVANYSQDVKQFANGFVVRIGAAANSTGTVIISPSTSATIRKIYPAFMLGSSVGNFSDGKMGRFFNHTLVLLPDGCGTLLRAFYCILEPRSGNHCPAGNSYTSFATYHTPATDCSDGNYNRNASLNSFKEYFNLRNCTFMYTYNITEDEILEWFGITQTAQGVHLFSSRYVDLYGGNMFQFATLPVYDTIKYYSIIPHSIRSIQSDRKAWAAFYVYKLQPLTFLLDFSVDGYIRRAIDCGFNDLSQLHCSYESFDVESGVYSVSSFEAKPSGSVVEQAEGVECDFSPLLSGTPPQVYNFKRLVFTNCNYNLTKLLSLFSVNDFTCSQISPAAIASNCYSSLILDYFSYPLSMKSDLSVSSAGPISQFNYKQSFSNPTCLILATVPHNLTTITKPLKYSYINKCSRLLSDDRTEVPQLVNANQYSPCVSIVPSTVWEDGDYYRKQLSPLEGGGWLVASGSTVAMTEQLQMGFGITVQYGTDTNSVCPKLEFANDTKIASQLGNCVEYSLYGVSGRGVFQNCTAVGVRQQRFVYDAYQNLVGYYSDDGNYYCLRACVSVPVSVIYDKETKTHATLFGSVACEHISSTMSQYSRSTRSMLKRRDSTYGPLQTPVGCVLGLVNSSLFVEDCKLPLGQSLCALPDTPSTLTPASVGSVPGEMRLASIAFNHPIQVDQLNSSYFKLSIPTNFSFGVTQEYIQTTIQKVTVDCKQYVCNGFQKCEQLLREYGQFCSKINQALHGANLRQDDSVRNLFASVKSSQSSPIIPGFGGDFNLTLLEPVSISTGSASAPSAIEDLLFDKVTIADPGYMQGYDDCMQQGPASARDLICAQYVAGYKVLPPLMDVNMEAAYTSSLLGSIAGVGWPAGLSSFAAPPFAQSIFYRLNGVGITQQVLSENQKLIANKFNQALGAMQTGFTTTPEAFQKVQDAVNNNAQALSKLASELSNTFGAISASIGDIIQRLDPPEQDAQIDRLINGRLTTLNAFVAQQLVRSESAALSAQLAKDKVNECVKAQSKRSGFCGQGTHIVSFVVNAPNGLYFMHVGYYPSNHIEVVSAYGLCDAANPTNCIAPVNGYFIKTNNTRIVDEWSYTGSSFYAPEPITSLNTKYVAPQVTYQNISTNLPPPLLGNSTGIDFQDELDEFFKNVSTSIPNFGSLTQINTTLLDLTYEMLSLQQVVKALNESYIDLKELGNYTYGSGSGSGSGSGSGSGSGSGSGSGSMQWNSSTFHQALLDPRVRGLYFPAGGSSSGTVNPVPTTASPISSIFSRTGDPAPNMESTTSGFLGPLLALQAGFFLLTRILTIPQSLDSWWTSLNFLGGAPTCPGQNLQSPTSNHSPTSCPPICPGYRWMCLRRFIIFLFILLLCLIFLLVLLDYQGMLPVCPLLPGTSTTSTGPCKTCTIPAQGTSMFPSCCCTKPSDGNCTCIPIPSSWAFARFLWEWASVRFSWLSLLVPFVQWFVGLSPTVWLSVIWMMWYWGPSLYNILNPFLPLLPIFFCLWVYI

SEQ ID NO: 307 - protein, 1501 aa, synthetic construct
  REGION 1..1501: note = Recombinant Sequence
MFIFLLFLTLTSGSDLDRCTTFDDVQAPNYTQHTSSMRGVYYPDEIFRSDTLYLTQDLFLPFYSNVTGFHTINHTFGNPVIPFKDGIYFAATEKSNVVRGWVFGSTMNNKSQSVIIINNSTNVVIRACNFELCDNPFFAVSKPMGTQTHTMIFDNAFNCTFEYISDAFSLDVSEKSGNFKHLREFVFKNKDGFLYVYKGYQPIDVVRDLPSGFNTLKPIFKLPLGINITNFRAILTAFSPAQDIWGTSAAAYFVGYLKPTTFMLKYDENGTITDAVDCSQNPLAELKCSVKSFEIDKGIYQTSNFRVVPSGDVVRFPNITNLCPFGEVFNATKFPSVYAWERKKISNCVADYSVLYNSTFFSTFKCYGVSATKLNDLCFSNVYADSFVVKGDDVRQIAPGQTGVIADYNYKLPDDFMGCVLAWNTRNIDATSTGNYNYKYRYLRHGKLRPFERDISNVPFSPDGKPCTPPALNCYWPLNDYGFYTTTGIGYQPYRVVVLSFELLNAPATVCGPKLSTDLIKNQCVNFNFNGLTGTGVLTPSSKRFQPFQQFGRDVSDFTDSVRDPKTSEILDISPCAFGGVSVITPGTNASSEVAVLYQDVNCTNVSAAIHADQLTPAWRIYSTGNNVFQTQAGCLIGAEHVDTSYECDIPIGAGICASYHTVSLLSSTSQKSIVAYTMSLGADSSIAYSNNTIAIPTNFSISITTEVMPVSMAKTSVDCNMYICGDSTECANLLLQYGSFCTQLNRALSGIAAEQDRNTREVFAQVKQMYKTPTLKYFGGFNFSQILPDPLKPTKRSPIEDLLFNKVTLADAGFMKQYGECLGDINARDLICAQKFNGLTVLPPLLTDDMIAAYTAALVSGTATAGWTFGAGPALQIPFPMQMAYRFNGIGVTQNVLYENQKQIANQFNKAISQIQESLTTTPTALGKLQDVVNQNAQALNTLVKQLSSNFGAISSVLNDILSRLDPPEAEVQIDRLITGRLQSLQTYVTQQLIRAAEIRASANLAATKMSECVLGQSKRVDFCGKGYHLMSFPQAAPHGVVFLHVTYVPSQERNFTTAPAICHEGKAYFPREGVFVFNGTSWFITQRNFFSPQIITTDNTFVSGNCDVVIGIINNTVYDPLQPELDSFKGELDKYFKNHTSPDVDLGDISGINASVVNIQKEIDRLNEVAKNLNESLIDLQELGKYGSGSGSGSGSGSGSGSGSGSGSGSGSGSGSGSMQWNSSTFHQALLDPRVRGLYFPAGGSSSGTVNPVPTTASPISSIFSRTGDPAPNMESTTSGFLGPLLALQAGFFLLTRILTIPQSLDSWWTSLNFLGGAPTCPGQNLQSPTSNHSPTSCPPICPGYRWMCLRRFIIFLFILLLCLIFLLVLLDYQGMLPVCPLLPGTSTTSTGPCKTCTIPAQGTSMFPSCCCTKPSDGNCTCIPIPSSWAFARFLWEWASVRFSWLSLLVPFVQWFVGLSPTVWLSVIWMMWYWGPSLYNILNPFLPLLPIFFCLWVYI

SEQ ID NO: 308 - protein, 1604 aa, synthetic construct
  REGION 1..1604: note = Recombinant Sequence
MIHSVFLLMFLLTPTESYVDVGPDSVKSACIEVDIQQTFFDKTWPRPIDVSKADGIIYPQGRTYSNITITYQGLFPYQGDHGDMYVYSAGHATGTTPQKLFVANYSQDVKQFANGFVVRIGAAANSTGTVIISPSTSATIRKIYPAFMLGSSVGNFSDGKMGRFFNHTLVLLPDGCGTLLRAFYCILEPRSGNHCPAGNSYTSFATYHTPATDCSDGNYNRNASLNSFKEYFNLRNCTFMYTYNITEDEILEWFGITQTAQGVHLFSSRYVDLYGGNMFQFATLPVYDTIKYYSIIPHSIRSIQSDRKAWAAFYVYKLQPLTFLLDFSVDGYIRRAIDCGFNDLSQLHCSYESFDVESGVYSVSSFEAKPSGSVVEQAEGVECDFSPLLSGTPPQVYNFKRLVFTNCNYNLTKLLSLFSVNDFTCSQISPAAIASNCYSSLILDYFSYPLSMKSDLSVSSAGPISQFNYKQSFSNPTCLILATVPHNLTTITKPLKYSYINKCSRLLSDDRTEVPQLVNANQYSPCVSIVPSTVWEDGDYYRKQLSPLEGGGWLVASGSTVAMTEQLQMGFGITVQYGTDTNSVCPKLEFANDTKIASQLGNCVEYSLYGVSGRGVFQNCTAVGVRQQRFVYDAYQNLVGYYSDDGNYYCLRACVSVPVSVIYDKETKTHATLFGSVACEHISSTMSQYSRSTRSMLKRRDSTYGPLQTPVGCVLGLVNSSLFVEDCKLPLGQSLCALPDTPSTLTPASVGSVPGEMRLASIAFNHPIQVDQLNSSYFKLSIPTNFSFGVTQEYIQTTIQKVTVDCKQYVCNGFQKCEQLLREYGQFCSKINQALHGANLRQDDSVRNLFASVKSSQSSPIIPGFGGDFNLTLLEPVSISTGSASAPSAIEDLLFDKVTIADPGYMQGYDDCMQQGPASARDLICAQYVAGYKVLPPLMDVNMEAAYTSSLLGSIAGVGWPAGLSSFAAPPFAQSIFYRLNGVGITQQVLSENQKLIANKFNQALGAMQTGFTTTPEAFQKVQDAVNNNAQALSKLASELSNTFGAISASIGDIIQRLDPPEQDAQIDRLINGRLTTLNAFVAQQLVRSESAALSAQLAKDKVNECVKAQSKRSGFCGQGTHIVSFVVNAPNGLYFMHVGYYPSNHIEVVSAYGLCDAANPTNCIAPVNGYFIKTNNTRIVDEWSYTGSSFYAPEPITSLNTKYVAPQVTYQNISTNLPPPLLGNSTGIDFQDELDEFFKNVSTSIPNFGSLTQINTTLLDLTYEMLSLQQVVKALNESYIDLKELGNYTYGSGSGSGSGSGSGSGSGSGSGSGSGSGSGSGSMQWNSSTFHQALLDPRVRGLYFPAGGSSSGTVNPVPTTASPISSIFSRTGDPAPNMESTTSGFLGPLLALQAGFFLLTRILTIPQSLDSWWTSLNFLGGAPTCPGQNLQSPTSNHSPTSCPPICPGYRWMCLRRFIIFLFILLLCLIFLLVLLDYQGMLPVCPLLPGTSTTSTGPCKTCTIPAQGTSMFPSCCCTKPSDGNCTCIPIPSSWAFARFLWEWASVRFSWLSLLVPFVQWFVGLSPTVWLSVIWMMWYWGPSLYNILNPFLPLLPIFFCLWVYI

SEQ ID NO: 309 - protein, 1604 aa, synthetic construct
  REGION 1..1604: note = Recombinant Sequence
MFIFLLFLTLTSGSDLDRCTTFDDVQAPNYTQHTSSMRGVYYPDEIFRSDTLYLTQDLFLPFYSNVTGFHTINHTFGNPVIPFKDGIYFAATEKSNVVRGWVFGSTMNNKSQSVIIINNSTNVVIRACNFELCDNPFFAVSKPMGTQTHTMIFDNAFNCTFEYISDAFSLDVSEKSGNFKHLREFVFKNKDGFLYVYKGYQPIDVVRDLPSGFNTLKPIFKLPLGINITNFRAILTAFSPAQDIWGTSAAAYFVGYLKPTTFMLKYDENGTITDAVDCSQNPLAELKCSVKSFEIDKGIYQTSNFRVVPSGDVVRFPNITNLCPFGEVFNATKFPSVYAWERKKISNCVADYSVLYNSTFFSTFKCYGVSATKLNDLCFSNVYADSFVVKGDDVRQIAPGQTGVIADYNYKLPDDFMGCVLAWNTRNIDATSTGNYNYKYRYLRHGKLRPFERDISNVPFSPDGKPCTPPALNCYWPLNDYGFYTTTGIGYQPYRVVVLSFELLNAPATVCGPKLSTDLIKNQCVNFNFNGLTGTGVLTPSSKRFQPFQQFGRDVSDFTDSVRDPKTSEILDISPCAFGGVSVITPGTNASSEVAVLYQDVNCTNVSAAIHADQLTPAWRIYSTGNNVFQTQAGCLIGAEHVDTSYECDIPIGAGICASYHTVSLLSSTSQKSIVAYTMSLGADSSIAYSNNTIAIPTNFSISITTEVMPVSMAKTSVDCNMYICGDSTECANLLLQYGSFCTQLNRALSGIAAEQDRNTREVFAQVKQMYKTPTLKYFGGFNFSQILPDPLKPTKRSPIEDLLFNKVTLADAGFMKQYGECLGDINARDLICAQKFNGLTVLPPLLTDDMIAAYTAALVSGTATAGWTFGAGPALQIPFPMQMAYRFNGIGVTQNVLYENQKQIANQFNKAISQIQESLTTTPTALGKLQDVVNQNAQALNTLVKQLSSNFGAISSVLNDILSRLDPPEAEVQIDRLITGRLQSLQTYVTQQLIRAAEIRASANLAATKMSECVLGQSKRVDFCGKGYHLMSFPQAAPHGVVFLHVTYVPSQERNFTTAPAICHEGKAYFPREGVFVFNGTSWFITQRNFFSPQIITTDNTFVSGNCDVVIGIINNTVYDPLQPELDSFKGELDKYFKNHTSPDVDLGDISGINASVVNIQKEIDRLNEVAKNLNESLIDLQELGKYGSGSGSGSGSGSGSGSMGGWSSKPRQGMGTNLSVPNPLGFFPDHQLDPAFGANSNNPDWDFNPNKDQWPEANQVGAGAFGPGFTPPHGGLLGWSPQAQGILTTVPAAPPPASTNRQSGRQPTPISPPLRDSHPQAMQWNSTTFHQALLDPRVRGLYFPAGGSSSGTVNPVPTTASPISSIFSRTGDPAPNMENTTSGFLGPLLVLQAGFFLLTRILTIPQSLDSWWTSLNFLGGAPTCPGQNSQSPTSNHSPTSCPPICPGYRWMCLRRFIIFLFILLLCLIFLLVLLDYQGMLPVCPLLPGTSTTSTGPCKTCTIPAQGTSMFPSCCCTKPSDGNCTCIPIPSSWAFARFLWEWASVRFSWLSLLVPFVQWFVGLSPTVWLSVIWMMWYWGPSLYNILSPFLPLLPIFFCLWVYI

SEQ ID NO: 310 - protein, 1707 aa, synthetic construct
  REGION 1..1707: note = Recombinant Sequence
MIHSVFLLMFLLTPTESYVDVGPDSVKSACIEVDIQQTFFDKTWPRPIDVSKADGIIYPQGRTYSNITITYQGLFPYQGDHGDMYVYSAGHATGTTPQKLFVANYSQDVKQFANGFVVRIGAAANSTGTVIISPSTSATIRKIYPAFMLGSSVGNFSDGKMGRFFNHTLVLLPDGCGTLLRAFYCILEPRSGNHCPAGNSYTSFATYHTPATDCSDGNYNRNASLNSFKEYFNLRNCTFMYTYNITEDEILEWFGITQTAQGVHLFSSRYVDLYGGNMFQFATLPVYDTIKYYSIIPHSIRSIQSDRKAWAAFYVYKLQPLTFLLDFSVDGYIRRAIDCGFNDLSQLHCSYESFDVESGVYSVSSFEAKPSGSVVEQAEGVECDFSPLLSGTPPQVYNFKRLVFTNCNYNLTKLLSLFSVNDFTCSQISPAAIASNCYSSLILDYFSYPLSMKSDLSVSSAGPISQFNYKQSFSNPTCLILATVPHNLTTITKPLKYSYINKCSRLLSDDRTEVPQLVNANQYSPCVSIVPSTVWEDGDYYRKQLSPLEGGGWLVASGSTVAMTEQLQMGFGITVQYGTDTNSVCPKLEFANDTKIASQLGNCVEYSLYGVSGRGVFQNCTAVGVRQQRFVYDAYQNLVGYYSDDGNYYCLRACVSVPVSVIYDKETKTHATLFGSVACEHISSTMSQYSRSTRSMLKRRDSTYGPLQTPVGCVLGLVNSSLFVEDCKLPLGQSLCALPDTPSTLTPASVGSVPGEMRLASIAFNHPIQVDQLNSSYFKLSIPTNFSFGVTQEYIQTTIQKVTVDCKQYVCNGFQKCEQLLREYGQFCSKINQALHGANLRQDDSVRNLFASVKSSQSSPIIPGFGGDFNLTLLEPVSISTGSASAPSAIEDLLFDKVTIADPGYMQGYDDCMQQGPASARDLICAQYVAGYKVLPPLMDVNMEAAYTSSLLGSIAGVGWPAGLSSFAAPPFAQSIFYRLNGVGITQQVLSENQKLIANKFNQALGAMQTGFTTTPEAFQKVQDAVNNNAQALSKLASELSNTFGAISASIGDIIQRLDPPEQDAQIDRLINGRLTTLNAFVAQQLVRSESAALSAQLAKDKVNECVKAQSKRSGFCGQGTHIVSFVVNAPNGLYFMHVGYYPSNHIEVVSAYGLCDAANPTNCIAPVNGYFIKTNNTRIVDEWSYTGSSFYAPEPITSLNTKYVAPQVTYQNISTNLPPPLLGNSTGIDFQDELDEFFKNVSTSIPNFGSLTQINTTLLDLTYEMLSLQQVVKALNESYIDLKELGNYTYGSGSGSGSGSGSGSGSMGGWSSKPRQGMGTNLSVPNPLGFFPDHQLDPAFGANSNNPDWDFNPNKDQWPEANQVGAGAFGPGFTPPHGGLLGWSPQAQGILTTVPAAPPPASTNRQSGRQPTPISPPLRDSHPQAMQWNSTTFHQALLDPRVRGLYFPAGGSSSGTVNPVPTTASPISSIFSRTGDPAPNMENTTSGFLGPLLVLQAGFFLLTRILTIPQSLDSWWTSLNFLGGAPTCPGQNSQSPTSNHSPTSCPPICPGYRWMCLRRFIIFLFILLLCLIFLLVLLDYQGMLPVCPLLPGTSTTSTGPCKTCTIPAQGTSMFPSCCCTKPSDGNCTCIPIPSSWAFARFLWEWASVRFSWLSLLVPFVQWFVGLSPTVWLSVIWMMWYWGPSLYNILSPFLPLLPIFFCLWVYI

SEQ ID NO: 311 - protein, 1612 aa, synthetic construct
  REGION 1..1612: note = Recombinant Sequence
MFIFLLFLTLTSGSDLDRCTTFDDVQAPNYTQHTSSMRGVYYPDEIFRSDTLYLTQDLFLPFYSNVTGFHTINHTFGNPVIPFKDGIYFAATEKSNVVRGWVFGSTMNNKSQSVIIINNSTNVVIRACNFELCDNPFFAVSKPMGTQTHTMIFDNAFNCTFEYISDAFSLDVSEKSGNFKHLREFVFKNKDGFLYVYKGYQPIDVVRDLPSGFNTLKPIFKLPLGINITNFRAILTAFSPAQDIWGTSAAAYFVGYLKPTTFMLKYDENGTITDAVDCSQNPLAELKCSVKSFEIDKGIYQTSNFRVVPSGDVVRFPNITNLCPFGEVFNATKFPSVYAWERKKISNCVADYSVLYNSTFFSTFKCYGVSATKLNDLCFSNVYADSFVVKGDDVRQIAPGQTGVIADYNYKLPDDFMGCVLAWNTRNIDATSTGNYNYKYRYLRHGKLRPFERDISNVPFSPDGKPCTPPALNCYWPLNDYGFYTTTGIGYQPYRVVVLSFELLNAPATVCGPKLSTDLIKNQCVNFNFNGLTGTGVLTPSSKRFQPFQQFGRDVSDFTDSVRDPKTSEILDISPCAFGGVSVITPGTNASSEVAVLYQDVNCTNVSAAIHADQLTPAWRIYSTGNNVFQTQAGCLIGAEHVDTSYECDIPIGAGICASYHTVSLLSSTSQKSIVAYTMSLGADSSIAYSNNTIAIPTNFSISITTEVMPVSMAKTSVDCNMYICGDSTECANLLLQYGSFCTQLNRALSGIAAEQDRNTREVFAQVKQMYKTPTLKYFGGFNFSQILPDPLKPTKRSPIEDLLFNKVTLADAGFMKQYGECLGDINARDLICAQKFNGLTVLPPLLTDDMIAAYTAALVSGTATAGWTFGAGPALQIPFPMQMAYRFNGIGVTQNVLYENQKQIANQFNKAISQIQESLTTTPTALGKLQDVVNQNAQALNTLVKQLSSNFGAISSVLNDILSRLDPPEAEVQIDRLITGRLQSLQTYVTQQLIRAAEIRASANLAATKMSECVLGQSKRVDFCGKGYHLMSFPQAAPHGVVFLHVTYVPSQERNFTTAPAICHEGKAYFPREGVFVFNGTSWFITQRNFFSPQIITTDNTFVSGNCDVVIGIINNTVYDPLQPELDSFKGELDKYFKNHTSPDVDLGDISGINASVVNIQKEIDRLNEVAKNLNESLIDLQELGKYGSGSGSGSGSGSGSGSGSGSGSGSMGGWSSKPRQGMGTNLSVPNPLGFFPDHQLDPAFGANSNNPDWDFNPNKDQWPEANQVGAGAFGPGFTPPHGGLLGWSPQAQGILTTVPAAPPPASTNRQSGRQPTPISPPLRDSHPQAMQWNSTTFHQALLDPRVRGLYFPAGGSSSGTVNPVPTTASPISSIFSRTGDPAPNMENTTSGFLGPLLVLQAGFFLLTRILTIPQSLDSWWTSLNFLGGAPTCPGQNSQSPTSNHSPTSCPPICPGYRWMCLRRFIIFLFILLLCLIFLLVLLDYQGMLPVCPLLPGTSTTSTGPCKTCTIPAQGTSMFPSCCCTKPSDGNCTCIPIPSSWAFARFLWEWASVRFSWLSLLVPFVQWFVGLSPTVWLSVIWMMWYWGPSLYNILSPFLPLLPIFFCLWVYI

SEQ ID NO: 312 - protein, 1715 aa, synthetic construct
  REGION 1..1715: note = Recombinant Sequence
MIHSVFLLMFLLTPTESYVDVGPDSVKSACIEVDIQQTFFDKTWPRPIDVSKADGIIYPQGRTYSNITITYQGLFPYQGDHGDMYVYSAGHATGTTPQKLFVANYSQDVKQFANGFVVRIGAAANSTGTVIISPSTSATIRKIYPAFMLGSSVGNFSDGKMGRFFNHTLVLLPDGCGTLLRAFYCILEPRSGNHCPAGNSYTSFATYHTPATDCSDGNYNRNASLNSFKEYFNLRNCTFMYTYNITEDEILEWFGITQTAQGVHLFSSRYVDLYGGNMFQFATLPVYDTIKYYSIIPHSIRSIQSDRKAWAAFYVYKLQPLTFLLDFSVDGYIRRAIDCGFNDLSQLHCSYESFDVESGVYSVSSFEAKPSGSVVEQAEGVECDFSPLLSGTPPQVYNFKRLVFTNCNYNLTKLLSLFSVNDFTCSQISPAAIASNCYSSLILDYFSYPLSMKSDLSVSSAGPISQFNYKQSFSNPTCLILATVPHNLTTITKPLKYSYINKCSRLLSDDRTEVPQLVNANQYSPCVSIVPSTVWEDGDYYRKQLSPLEGGGWLVASGSTVAMTEQLQMGFGITVQYGTDTNSVCPKLEFANDTKIASQLGNCVEYSLYGVSGRGVFQNCTAVGVRQQRFVYDAYQNLVGYYSDDGNYYCLRACVSVPVSVIYDKETKTHATLFGSVACEHISSTMSQYSRSTRSMLKRRDSTYGPLQTPVGCVLGLVNSSLFVEDCKLPLGQSLCALPDTPSTLTPASVGSVPGEMRLASIAFNHPIQVDQLNSSYFKLSIPTNFSFGVTQEYIQTTIQKVTVDCKQYVCNGFQKCEQLLREYGQFCSKINQALHGANLRQDDSVRNLFASVKSSQSSPIIPGFGGDFNLTLLEPVSISTGSASAPSAIEDLLFDKVTIADPGYMQGYDDCMQQGPASARDLICAQYVAGYKVLPPLMDVNMEAAYTSSLLGSIAGVGWPAGLSSFAAPPFAQSIFYRLNGVGITQQVLSENQKLIANKFNQALGAMQTGFTTTPEAFQKVQDAVNNNAQALSKLASELSNTFGAISASIGDIIQRLDPPEQDAQIDRLINGRLTTLNAFVAQQLVRSESAALSAQLAKDKVNECVKAQSKRSGFCGQGTHIVSFVVNAPNGLYFMHVGYYPSNHIEVVSAYGLCDAANPTNCIAPVNGYFIKTNNTRIVDEWSYTGSSFYAPEPITSLNTKYVAPQVTYQNISTNLPPPLLGNSTGIDFQDELDEFFKNVSTSIPNFGSLTQINTTLLDLTYEMLSLQQVVKALNESYIDLKELGNYTYGSGSGSGSGSGSGSGSGSGSGSGSMGGWSSKPRQGMGTNLSVPNPLGFFPDHQLDPAFGANSNNPDWDFNPNKDQWPEANQVGAGAFGPGFTPPHGGLLGWSPQAQGILTTVPAAPPPASTNRQSGRQPTPISPPLRDSHPQAMQWNSTTFHQALLDPRVRGLYFPAGGSSSGTVNPVPTTASPISSIFSRTGDPAPNMENTTSGFLGPLLVLQAGFFLLTRILTIPQSLDSWWTSLNFLGGAPTCPGQNSQSPTSNHSPTSCPPICPGYRWMCLRRFIIFLFILLLCLIFLLVLLDYQGMLPVCPLLPGTSTTSTGPCKTCTIPAQGTSMFPSCCCTKPSDGNCTCIPIPSSWAFARFLWEWASVRFSWLSLLVPFVQWFVGLSPTVWLSVIWMMWYWGPSLYNILSPFLPLLPIFFCLWVYI

SEQ ID NO: 313 - protein, 1620 aa, synthetic construct
  REGION 1..1620: note = Recombinant Sequence
MFIFLLFLTLTSGSDLDRCTTFDDVQAPNYTQHTSSMRGVYYPDEIFRSDTLYLTQDLFLPFYSNVTGFHTINHTFGNPVIPFKDGIYFAATEKSNVVRGWVFGSTMNNKSQSVIIINNSTNVVIRACNFELCDNPFFAVSKPMGTQTHTMIFDNAFNCTFEYISDAFSLDVSEKSGNFKHLREFVFKNKDGFLYVYKGYQPIDVVRDLPSGFNTLKPIFKLPLGINITNFRAILTAFSPAQDIWGTSAAAYFVGYLKPTTFMLKYDENGTITDAVDCSQNPLAELKCSVKSFEIDKGIYQTSNFRVVPSGDVVRFPNITNLCPFGEVFNATKFPSVYAWERKKISNCVADYSVLYNSTFFSTFKCYGVSATKLNDLCFSNVYADSFVVKGDDVRQIAPGQTGVIADYNYKLPDDFMGCVLAWNTRNIDATSTGNYNYKYRYLRHGKLRPFERDISNVPFSPDGKPCTPPALNCYWPLNDYGFYTTTGIGYQPYRVVVLSFELLNAPATVCGPKLSTDLIKNQCVNFNFNGLTGTGVLTPSSKRFQPFQQFGRDVSDFTDSVRDPKTSEILDISPCAFGGVSVITPGTNASSEVAVLYQDVNCTNVSAAIHADQLTPAWRIYSTGNNVFQTQAGCLIGAEHVDTSYECDIPIGAGICASYHTVSLLSSTSQKSIVAYTMSLGADSSIAYSNNTIAIPTNFSISITTEVMPVSMAKTSVDCNMYICGDSTECANLLLQYGSFCTQLNRALSGIAAEQDRNTREVFAQVKQMYKTPTLKYFGGFNFSQILPDPLKPTKRSPIEDLLFNKVTLADAGFMKQYGECLGDINARDLICAQKFNGLTVLPPLLTDDMIAAYTAALVSGTATAGWTFGAGPALQIPFPMQMAYRFNGIGVTQNVLYENQKQIANQFNKAISQIQESLTTTPTALGKLQDVVNQNAQALNTLVKQLSSNFGAISSVLNDILSRLDPPEAEVQIDRLITGRLQSLQTYVTQQLIRAAEIRASANLAATKMSECVLGQSKRVDFCGKGYHLMSFPQAAPHGVVFLHVTYVPSQERNFTTAPAICHEGKAYFPREGVFVFNGTSWFITQRNFFSPQIITTDNTFVSGNCDVVIGIINNTVYDPLQPELDSFKGELDKYFKNHTSPDVDLGDISGINASVVNIQKEIDRLNEVAKNLNESLIDLQELGKYGSGSGSGSGSGSGSGSGSGSGSGSGSGSGSGSMGGWSSKPRQGMGTNLSVPNPLGFFPDHQLDPAFGANSNNPDWDFNPNKDQWPEANQVGAGAFGPGFTPPHGGLLGWSPQAQGILTTVPAAPPPASTNRQSGRQPTPISPPLRDSHPQAMQWNSTTFHQALLDPRVRGLYFPAGGSSSGTVNPVPTTASPISSIFSRTGDPAPNMENTTSGFLGPLLVLQAGFFLLTRILTIPQSLDSWWTSLNFLGGAPTCPGQNSQSPTSNHSPTSCPPICPGYRWMCLRRFIIFLFILLLCLIFLLVLLDYQGMLPVCPLLPGTSTTSTGPCKTCTIPAQGTSMFPSCCCTKPSDGNCTCIPIPSSWAFARFLWEWASVRFSWLSLLVPFVQWFVGLSPTVWLSVIWMMWYWGPSLYNILSPFLPLLPIFFCLWVYI

SEQ ID NO: 314 - protein, 1723 aa, synthetic construct
  REGION 1..1723: note = Recombinant Sequence
MIHSVFLLMFLLTPTESYVDVGPDSVKSACIEVDIQQTFFDKTWPRPIDVSKADGIIYPQGRTYSNITITYQGLFPYQGDHGDMYVYSAGHATGTTPQKLFVANYSQDVKQFANGFVVRIGAAANSTGTVIISPSTSATIRKIYPAFMLGSSVGNFSDGKMGRFFNHTLVLLPDGCGTLLRAFYCILEPRSGNHCPAGNSYTSFATYHTPATDCSDGNYNRNASLNSFKEYFNLRNCTFMYTYNITEDEILEWFGITQTAQGVHLFSSRYVDLYGGNMFQFATLPVYDTIKYYSIIPHSIRSIQSDRKAWAAFYVYKLQPLTFLLDFSVDGYIRRAIDCGFNDLSQLHCSYESFDVESGVYSVSSFEAKPSGSVVEQAEGVECDFSPLLSGTPPQVYNFKRLVFTNCNYNLTKLLSLFSVNDFTCSQISPAAIASNCYSSLILDYFSYPLSMKSDLSVSSAGPISQFNYKQSFSNPTCLILATVPHNLTTITKPLKYSYINKCSRLLSDDRTEVPQLVNANQYSPCVSIVPSTVWEDGDYYRKQLSPLEGGGWLVASGSTVAMTEQLQMGFGITVQYGTDTNSVCPKLEFANDTKIASQLGNCVEYSLYGVSGRGVFQNCTAVGVRQQRFVYDAYQNLVGYYSDDGNYYCLRACVSVPVSVIYDKETKTHATLFGSVACEHISSTMSQYSRSTRSMLKRRDSTYGPLQTPVGCVLGLVNSSLFVEDCKLPLGQSLCALPDTPSTLTPASVGSVPGEMRLASIAFNHPIQVDQLNSSYFKLSIPTNFSFGVTQEYIQTTIQKVTVDCKQYVCNGFQKCEQLLREYGQFCSKINQALHGANLRQDDSVRNLFASVKSSQSSPIIPGFGGDFNLTLLEPVSISTGSASAPSAIEDLLFDKVTIADPGYMQGYDDCMQQGPASARDLICAQYVAGYKVLPPLMDVNMEAAYTSSLLGSIAGVGWPAGLSSFAAPPFAQSIFYRLNGVGITQQVLSENQKLIANKFNQALGAMQTGFTTTPEAFQKVQDAVNNNAQALSKLASELSNTFGAISASIGDIIQRLDPPEQDAQIDRLINGRLTTLNAFVAQQLVRSESAALSAQLAKDKVNECVKAQSKRSGFCGQGTHIVSFVVNAPNGLYFMHVGYYPSNHIEVVSAYGLCDAANPTNCIAPVNGYFIKTNNTRIVDEWSYTGSSFYAPEPITSLNTKYVAPQVTYQNISTNLPPPLLGNSTGIDFQDELDEFFKNVSTSIPNFGSLTQINTTLLDLTYEMLSLQQVVKALNESYIDLKELGNYTYGSGSGSGSGSGSGSGSGSGSGSGSGSGSGSGSMGGWSSKPRQGMGTNLSVPNPLGFFPDHQLDPAFGANSNNPDWDFNPNKDQWPEANQVGAGAFGPGFTPPHGGLLGWSPQAQGILTTVPAAPPPASTNRQSGRQPTPISPPLRDSHPQAMQWNSTTFHQALLDPRVRGLYFPAGGSSSGTVNPVPTTASPISSIFSRTGDPAPNMENTTSGFLGPLLVLQAGFFLLTRILTIPQSLDSWWTSLNFLGGAPTCPGQNSQSPTSNHSPTSCPPICPGYRWMCLRRFIIFLFILLLCLIFLLVLLDYQGMLPVCPLLPGTSTTSTGPCKTCTIPAQGTSMFPSCCCTKPSDGNCTCIPIPSSWAFARFLWEWASVRFSWLSLLVPFVQWFVGLSPTVWLSVIWMMWYWGPSLYNILSPFLPLLPIFFCLWVYI

SEQ ID NO: 315 - protein, 1464 aa, synthetic construct
  REGION 1..1464: note = Recombinant Sequence
MFVFLVLLPLVSSQCVNLTTRTQLPPAYTNSFTRGVYYPDKVFRSSVLHSTQDLFLPFFSNVTWFHAIHVSGTNGTKRFDNPVLPFNDGVYFASIEKSNIIRGWIFGTTLDSKTQSLLIVNNATNVVIKVCEFQFCNDPFLGTSNHKNNKSWMESEFRVYSSANNCTFEYVSQPFLMDLEGKQGNFKNLREFVFKNIDGYFKIYSKHTPINLVRDLPQGFSALEPLVDLPIGINITRFQTLLALHRSYLTPGDSSSGWTAGAAAYYVGYLQPRTFLLKYNENGTITDAVDCALDPLSETKCTLKSFTVEKGIYQTSNFRVQPTESIVRFPNITNLCPFGEVFNATKFASVYAWNRKRISNCVADYSVLYNSASFSTFKCYGVSPTKLNDLCFTNVYADSFVIRGDEVRQIAPGQTGKIADYNYKLPDDFTGCVIAWNSNNLDSKVGGNYNYLYRLFRKSNLKPFERDISTEIYQAGSTPCNGVKGFNCYFPLQSYGFQPTYGVGYQPYRVVVLSFELLHAPATVCGPKKSTNLVKNKCVNFNFNGLTGTGVLTESNKKFLPFQQFGRDIADTTDAVRDPQTLEILDITPCSFGGVSVITPGTNTSNQVAVLYQGVNCTEVPVAIHADQLTPTWRVYSTGSNVFQTRAGCLIGAEHVNNSYECDIPIGAGICASYQTQTNSHGSASSVASQSIIAYTMSLGAENSVAYSNNSIAIPTNFTISVTTEILPVSMTKTSVDCTMYICGDSTECSNLLLQYGSFCTQLNRALTGIAVEQDKNTQEVFAQVKQIYKTPPIKDFGGFNFSQILPDPSKPSKRSPIEDLLFNKVTLADAGFIKQYGDCLGDIAARDLICAQKFNGLTVLPPLLTDEMIAQYTSALLAGTITSGWTFGAGPALQIPFPMQMAYRFNGIGVTQNVLYENQKLIANQFNSAIGKIQDSLSSTPSALGKLQNVVNQNAQALNTLVKQLSSNFGAISSVLNDILSRLDPPEAEVQIDRLITGRLQSLQTYVTQQLIRAAEIRASANLAATKMSECVLGQSKRVDFCGKGYHLMSFPQSAPHGVVFLHVTYVPAQEKNFTTAPAICHDGKAHFPREGVFVSNGTHWFVTQRNFYEPQIITTDNTFVSGNCDVVIGIVNNTVYDPLQPELDSFKEELDKYFKNHTSPDVDLGDISGINASVVNIQKEIDRLNEVAKNLNESLIDLQELGKYGSGSGSGSGSGSGSGSGSGSGSGSGSGSGSGSMENTTSGFLGPLLVLQAGFFLLTRILTIPQSLDSWWTSLNFLGGAPTCPGQNSRSPTSNHSPTSCPPICPGYRWMCLRRFIIFLFILLLCLIFLLVLLDYQGMLPVCPLLPGTSTTSTGPCKTCTNPANGTSMFPSCCCTKPSDGNCTCIPIPSSWAFARFLWEWASVRFSWLSFLVPFVQWFVGLSPTVWLSVMWMMWYWGPSLYNILSPFLPLLPIFFCLWVYI

SEQ ID NO: 316 - protein, 1503 aa, synthetic construct
  REGION 1..1503: note = Recombinant Sequence
MFVFLVLLPLVSSQCVNLTTRTQLPPAYTNSFTRGVYYPDKVFRSSVLHSTQDLFLPFFSNVTWFHAIHVSGTNGTKRFDNPVLPFNDGVYFASIEKSNIIRGWIFGTTLDSKTQSLLIVNNATNVVIKVCEFQFCNDPFLGTSNHKNNKSWMESEFRVYSSANNCTFEYVSQPFLMDLEGKQGNFKNLREFVFKNIDGYFKIYSKHTPINLVRDLPQGFSALEPLVDLPIGINITRFQTLLALHRSYLTPGDSSSGWTAGAAAYYVGYLQPRTFLLKYNENGTITDAVDCALDPLSETKCTLKSFTVEKGIYQTSNFRVQPTESIVRFPNITNLCPFGEVFNATKFASVYAWNRKRISNCVADYSVLYNSASFSTFKCYGVSPTKLNDLCFTNVYADSFVIRGDEVRQIAPGQTGKIADYNYKLPDDFTGCVIAWNSNNLDSKVGGNYNYLYRLFRKSNLKPFERDISTEIYQAGSTPCNGVKGFNCYFPLQSYGFQPTYGVGYQPYRVVVLSFELLHAPATVCGPKKSTNLVKNKCVNFNFNGLTGTGVLTESNKKFLPFQQFGRDIADTTDAVRDPQTLEILDITPCSFGGVSVITPGTNTSNQVAVLYQGVNCTEVPVAIHADQLTPTWRVYSTGSNVFQTRAGCLIGAEHVNNSYECDIPIGAGICASYQTQTNSHGSASSVASQSIIAYTMSLGAENSVAYSNNSIAIPTNFTISVTTEILPVSMTKTSVDCTMYICGDSTECSNLLLQYGSFCTQLNRALTGIAVEQDKNTQEVFAQVKQIYKTPPIKDFGGFNFSQILPDPSKPSKRSPIEDLLFNKVTLADAGFIKQYGDCLGDIAARDLICAQKFNGLTVLPPLLTDEMIAQYTSALLAGTITSGWTFGAGPALQIPFPMQMAYRFNGIGVTQNVLYENQKLIANQFNSAIGKIQDSLSSTPSALGKLQNVVNQNAQALNTLVKQLSSNFGAISSVLNDILSRLDPPEAEVQIDRLITGRLQSLQTYVTQQLIRAAEIRASANLAATKMSECVLGQSKRVDFCGKGYHLMSFPQSAPHGVVFLHVTYVPAQEKNFTTAPAICHDGKAHFPREGVFVSNGTHWFVTQRNFYEPQIITTDNTFVSGNCDVVIGIVNNTVYDPLQPELDSFKEELDKYFKNHTSPDVDLGDISGINASVVNIQKEIDRLNEVAKNLNESLIDLQELGKYGSGSGSGSGSGSGSGSMQWNSSTFHQALLDPRVRGLYFPAGGSSSGTVNPVPTTASPISSIFSRTGDPAPNMESTTSGFLGPLLALQAGFFLLTRILTIPQSLDSWWTSLNFLGGAPTCPGQNLQSPTSNHSPTSCPPICPGYRWMCLRRFIIFLFILLLCLIFLLVLLDYQGMLPVCPLLPGTSTTSTGPCKTCTIPAQGTSMFPSCCCTKPSDGNCTCIPIPSSWAFARFLWEWASVRFSWLSLLVPFVQWFVGLSPTVWLSVIWMMWYWGPSLYNILNPFLPLLPIFFCLWVYI

SEQ ID NO: 317 - protein, 1511 aa, synthetic construct
  REGION 1..1511: note = Recombinant Sequence
MFVFLVLLPLVSSQCVNLTTRTQLPPAYTNSFTRGVYYPDKVFRSSVLHSTQDLFLPFFSNVTWFHAIHVSGTNGTKRFDNPVLPFNDGVYFASIEKSNIIRGWIFGTTLDSKTQSLLIVNNATNVVIKVCEFQFCNDPFLGTSNHKNNKSWMESEFRVYSSANNCTFEYVSQPFLMDLEGKQGNFKNLREFVFKNIDGYFKIYSKHTPINLVRDLPQGFSALEPLVDLPIGINITRFQTLLALHRSYLTPGDSSSGWTAGAAAYYVGYLQPRTFLLKYNENGTITDAVDCALDPLSETKCTLKSFTVEKGIYQTSNFRVQPTESIVRFPNITNLCPFGEVFNATKFASVYAWNRKRISNCVADYSVLYNSASFSTFKCYGVSPTKLNDLCFTNVYADSFVIRGDEVRQIAPGQTGKIADYNYKLPDDFTGCVIAWNSNNLDSKVGGNYNYLYRLFRKSNLKPFERDISTEIYQAGSTPCNGVKGFNCYFPLQSYGFQPTYGVGYQPYRVVVLSFELLHAPATVCGPKKSTNLVKNKCVNFNFNGLTGTGVLTESNKKFLPFQQFGRDIADTTDAVRDPQTLEILDITPCSFGGVSVITPGTNTSNQVAVLYQGVNCTEVPVAIHADQLTPTWRVYSTGSNVFQTRAGCLIGAEHVNNSYECDIPIGAGICASYQTQTNSHGSASSVASQSIIAYTMSLGAENSVAYSNNSIAIPTNFTISVTTEILPVSMTKTSVDCTMYICGDSTECSNLLLQYGSFCTQLNRALTGIAVEQDKNTQEVFAQVKQIYKTPPIKDFGGFNFSQILPDPSKPSKRSPIEDLLFNKVTLADAGFIKQYGDCLGDIAARDLICAQKFNGLTVLPPLLTDEMIAQYTSALLAGTITSGWTFGAGPALQIPFPMQMAYRFNGIGVTQNVLYENQKLIANQFNSAIGKIQDSLSSTPSALGKLQNVVNQNAQALNTLVKQLSSNFGAISSVLNDILSRLDPPEAEVQIDRLITGRLQSLQTYVTQQLIRAAEIRASANLAATKMSECVLGQSKRVDFCGKGYHLMSFPQSAPHGVVFLHVTYVPAQEKNFTTAPAICHDGKAHFPREGVFVSNGTHWFVTQRNFYEPQIITTDNTFVSGNCDVVIGIVNNTVYDPLQPELDSFKEELDKYFKNHTSPDVDLGDISGINASVVNIQKEIDRLNEVAKNLNESLIDLQELGKYGSGSGSGSGSGSGSGSGSGSGSGSMQWNSSTFHQALLDPRVRGLYFPAGGSSSGTVNPVPTTASPISSIFSRTGDPAPNMESTTSGFLGPLLALQAGFFLLTRILTIPQSLDSWWTSLNFLGGAPTCPGQNLQSPTSNHSPTSCPPICPGYRWMCLRRFIIFLFILLLCLIFLLVLLDYQGMLPVCPLLPGTSTTSTGPCKTCTIPAQGTSMFPSCCCTKPSDGNCTCIPIPSSWAFARFLWEWASVRFSWLSLLVPFVQWFVGLSPTVWLSVIWMMWYWGPSLYNILNPFLPLLPIFFCLWVYI

SEQ ID NO: 318 - protein, 1519 aa, synthetic construct
  REGION 1..1519: note = Recombinant Sequence
MFVFLVLLPLVSSQCVNLTTRTQLPPAYTNSFTRGVYYPDKVFRSSVLHSTQDLFLPFFSNVTWFHAIHVSGTNGTKRFDNPVLPFNDGVYFASIEKSNIIRGWIFGTTLDSKTQSLLIVNNATNVVIKVCEFQFCNDPFLGTSNHKNNKSWMESEFRVYSSANNCTFEYVSQPFLMDLEGKQGNFKNLREFVFKNIDGYFKIYSKHTPINLVRDLPQGFSALEPLVDLPIGINITRFQTLLALHRSYLTPGDSSSGWTAGAAAYYVGYLQPRTFLLKYNENGTITDAVDCALDPLSETKCTLKSFTVEKGIYQTSNFRVQPTESIVRFPNITNLCPFGEVFNATKFASVYAWNRKRISNCVADYSVLYNSASFSTFKCYGVSPTKLNDLCFTNVYADSFVIRGDEVRQIAPGQTGKIADYNYKLPDDFTGCVIAWNSNNLDSKVGGNYNYLYRLFRKSNLKPFERDISTEIYQAGSTPCNGVKGFNCYFPLQSYGFQPTYGVGYQPYRVVVLSFELLHAPATVCGPKKSTNLVKNKCVNFNFNGLTGTGVLTESNKKFLPFQQFGRDIADTTDAVRDPQTLEILDITPCSFGGVSVITPGTNTSNQVAVLYQGVNCTEVPVAIHADQLTPTWRVYSTGSNVFQTRAGCLIGAEHVNNSYECDIPIGAGICASYQTQTNSHGSASSVASQSIIAYTMSLGAENSVAYSNNSIAIPTNFTISVTTEILPVSMTKTSVDCTMYICGDSTECSNLLLQYGSFCTQLNRALTGIAVEQDKNTQEVFAQVKQIYKTPPIKDFGGFNFSQILPDPSKPSKRSPIEDLLFNKVTLADAGFIKQYGDCLGDIAARDLICAQKFNGLTVLPPLLTDEMIAQYTSALLAGTITSGWTFGAGPALQIPFPMQMAYRFNGIGVTQNVLYENQKLIANQFNSAIGKIQDSLSSTPSALGKLQNVVNQNAQALNTLVKQLSSNFGAISSVLNDILSRLDPPEAEVQIDRLITGRLQSLQTYVTQQLIRAAEIRASANLAATKMSECVLGQSKRVDFCGKGYHLMSFPQSAPHGVVFLHVTYVPAQEKNFTTAPAICHDGKAHFPREGVFVSNGTHWFVTQRNFYEPQIITTDNTFVSGNCDVVIGIVNNTVYDPLQPELDSFKEELDKYFKNHTSPDVDLGDISGINASVVNIQKEIDRLNEVAKNLNESLIDLQELGKYGSGSGSGSGSGSGSGSGSGSGSGSGSGSGSGSMQWNSSTFHQALLDPRVRGLYFPAGGSSSGTVNPVPTTASPISSIFSRTGDPAPNMESTTSGFLGPLLALQAGFFLLTRILTIPQSLDSWWTSLNFLGGAPTCPGQNLQSPTSNHSPTSCPPICPGYRWMCLRRFIIFLFILLLCLIFLLVLLDYQGMLPVCPLLPGTSTTSTGPCKTCTIPAQGTSMFPSCCCTKPSDGNCTCIPIPSSWAFARFLWEWASVRFSWLSLLVPFVQWFVGLSPTVWLSVIWMMWYWGPSLYNILNPFLPLLPIFFCLWVYI

SEQ ID NO: 319 - protein, 1622 aa, synthetic construct
  REGION 1..1622: note = Recombinant Sequence
MFVFLVLLPLVSSQCVNLTTRTQLPPAYTNSFTRGVYYPDKVFRSSVLHSTQDLFLPFFSNVTWFHAIHVSGTNGTKRFDNPVLPFNDGVYFASIEKSNIIRGWIFGTTLDSKTQSLLIVNNATNVVIKVCEFQFCNDPFLGTSNHKNNKSWMESEFRVYSSANNCTFEYVSQPFLMDLEGKQGNFKNLREFVFKNIDGYFKIYSKHTPINLVRDLPQGFSALEPLVDLPIGINITRFQTLLALHRSYLTPGDSSSGWTAGAAAYYVGYLQPRTFLLKYNENGTITDAVDCALDPLSETKCTLKSFTVEKGIYQTSNFRVQPTESIVRFPNITNLCPFGEVFNATKFASVYAWNRKRISNCVADYSVLYNSASFSTFKCYGVSPTKLNDLCFTNVYADSFVIRGDEVRQIAPGQTGKIADYNYKLPDDFTGCVIAWNSNNLDSKVGGNYNYLYRLFRKSNLKPFERDISTEIYQAGSTPCNGVKGFNCYFPLQSYGFQPTYGVGYQPYRVVVLSFELLHAPATVCGPKKSTNLVKNKCVNFNFNGLTGTGVLTESNKKFLPFQQFGRDIADTTDAVRDPQTLEILDITPCSFGGVSVITPGTNTSNQVAVLYQGVNCTEVPVAIHADQLTPTWRVYSTGSNVFQTRAGCLIGAEHVNNSYECDIPIGAGICASYQTQTNSHGSASSVASQSIIAYTMSLGAENSVAYSNNSIAIPTNFTISVTTEILPVSMTKTSVDCTMYICGDSTECSNLLLQYGSFCTQLNRALTGIAVEQDKNTQEVFAQVKQIYKTPPIKDFGGFNFSQILPDPSKPSKRSPIEDLLFNKVTLADAGFIKQYGDCLGDIAARDLICAQKFNGLTVLPPLLTDEMIAQYTSALLAGTITSGWTFGAGPALQIPFPMQMAYRFNGIGVTQNVLYENQKLIANQFNSAIGKIQDSLSSTPSALGKLQNVVNQNAQALNTLVKQLSSNFGAISSVLNDILSRLDPPEAEVQIDRLITGRLQSLQTYVTQQLIRAAEIRASANLAATKMSECVLGQSKRVDFCGKGYHLMSFPQSAPHGVVFLHVTYVPAQEKNFTTAPAICHDGKAHFPREGVFVSNGTHWFVTQRNFYEPQIITTDNTFVSGNCDVVIGIVNNTVYDPLQPELDSFKEELDKYFKNHTSPDVDLGDISGINASVVNIQKEIDRLNEVAKNLNESLIDLQELGKYGSGSGSGSGSGSGSGSMGGWSSKPRQGMGTNLSVPNPLGFFPDHQLDPAFGANSNNPDWDFNPNKDQWPEANQVGAGAFGPGFTPPHGGLLGWSPQAQGILTTVPAAPPPASTNRQSGRQPTPISPPLRDSHPQAMQWNSTTFHQALLDPRVRGLYFPAGGSSSGTVNPVPTTASPISSIFSRTGDPAPNMENTTSGFLGPLLVLQAGFFLLTRILTIPQSLDSWWTSLNFLGGAPTCPGQNSQSPTSNHSPTSCPPICPGYRWMCLRRFIIFLFILLLCLIFLLVLLDYQGMLPVCPLLPGTSTTSTGPCKTCTIPAQGTSMFPSCCCTKPSDGNCTCIPIPSSWAFARFLWEWASVRFSWLSLLVPFVQWFVGLSPTVWLSVIWMMWYWGPSLYNILSPFLPLLPIFFCLWVYI

SEQ ID NO: 320 - protein, 1630 aa, synthetic construct
  REGION 1..1630: note = Recombinant Sequence
MFVFLVLLPLVSSQCVNLTTRTQLPPAYTNSFTRGVYYPDKVFRSSVLHSTQDLFLPFFSNVTWFHAIHVSGTNGTKRFDNPVLPFNDGVYFASIEKSNIIRGWIFGTTLDSKTQSLLIVNNATNVVIKVCEFQFCNDPFLGTSNHKNNKSWMESEFRVYSSANNCTFEYVSQPFLMDLEGKQGNFKNLREFVFKNIDGYFKIYSKHTPINLVRDLPQGFSALEPLVDLPIGINITRFQTLLALHRSYLTPGDSSSGWTAGAAAYYVGYLQPRTFLLKYNENGTITDAVDCALDPLSETKCTLKSFTVEKGIYQTSNFRVQPTESIVRFPNITNLCPFGEVFNATKFASVYAWNRKRISNCVADYSVLYNSASFSTFKCYGVSPTKLNDLCFTNVYADSFVIRGDEVRQIAPGQTGKIADYNYKLPDDFTGCVIAWNSNNLDSKVGGNYNYLYRLFRKSNLKPFERDISTEIYQAGSTPCNGVKGFNCYFPLQSYGFQPTYGVGYQPYRVVVLSFELLHAPATVCGPKKSTNLVKNKCVNFNFNGLTGTGVLTESNKKFLPFQQFGRDIADTTDAVRDPQTLEILDITPCSFGGVSVITPGTNTSNQVAVLYQGVNCTEVPVAIHADQLTPTWRVYSTGSNVFQTRAGCLIGAEHVNNSYECDIPIGAGICASYQTQTNSHGSASSVASQSIIAYTMSLGAENSVAYSNNSIAIPTNFTISVTTEILPVSMTKTSVDCTMYICGDSTECSNLLLQYGSFCTQLNRALTGIAVEQDKNTQEVFAQVKQIYKTPPIKDFGGFNFSQILPDPSKPSKRSPIEDLLFNKVTLADAGFIKQYGDCLGDIAARDLICAQKFNGLTVLPPLLTDEMIAQYTSALLAGTITSGWTFGAGPALQIPFPMQMAYRFNGIGVTQNVLYENQKLIANQFNSAIGKIQDSLSSTPSALGKLQNVVNQNAQALNTLVKQLSSNFGAISSVLNDILSRLDPPEAEVQIDRLITGRLQSLQTYVTQQLIRAAEIRASANLAATKMSECVLGQSKRVDFCGKGYHLMSFPQSAPHGVVFLHVTYVPAQEKNFTTAPAICHDGKAHFPREGVFVSNGTHWFVTQRNFYEPQIITTDNTFVSGNCDVVIGIVNNTVYDPLQPELDSFKEELDKYFKNHTSPDVDLGDISGINASVVNIQKEIDRLNEVAKNLNESLIDLQELGKYGSGSGSGSGSGSGSGSGSGSGSGSMGGWSSKPRQGMGTNLSVPNPLGFFPDHQLDPAFGANSNNPDWDFNPNKDQWPEANQVGAGAFGPGFTPPHGGLLGWSPQAQGILTTVPAAPPPASTNRQSGRQPTPISPPLRDSHPQAMQWNSTTFHQALLDPRVRGLYFPAGGSSSGTVNPVPTTASPISSIFSRTGDPAPNMENTTSGFLGPLLVLQAGFFLLTRILTIPQSLDSWWTSLNFLGGAPTCPGQNSQSPTSNHSPTSCPPICPGYRWMCLRRFIIFLFILLLCLIFLLVLLDYQGMLPVCPLLPGTSTTSTGPCKTCTIPAQGTSMFPSCCCTKPSDGNCTCIPIPSSWAFARFLWEWASVRFSWLSLLVPFVQWFVGLSPTVWLSVIWMMWYWGPSLYNILSPFLPLLPIFFCLWVYI

SEQ ID NO: 321 - protein, 1638 aa, synthetic construct
  REGION 1..1638: note = Recombinant Sequence
MFVFLVLLPLVSSQCVNLTTRTQLPPAYTNSFTRGVYYPDKVFRSSVLHSTQDLFLPFFSNVTWFHAIHVSGTNGTKRFDNPVLPFNDGVYFASIEKSNIIRGWIFGTTLDSKTQSLLIVNNATNVVIKVCEFQFCNDPFLGTSNHKNNKSWMESEFRVYSSANNCTFEYVSQPFLMDLEGKQGNFKNLREFVFKNIDGYFKIYSKHTPINLVRDLPQGFSALEPLVDLPIGINITRFQTLLALHRSYLTPGDSSSGWTAGAAAYYVGYLQPRTFLLKYNENGTITDAVDCALDPLSETKCTLKSFTVEKGIYQTSNFRVQPTESIVRFPNITNLCPFGEVFNATKFASVYAWNRKRISNCVADYSVLYNSASFSTFKCYGVSPTKLNDLCFTNVYADSFVIRGDEVRQIAPGQTGKIADYNYKLPDDFTGCVIAWNSNNLDSKVGGNYNYLYRLFRKSNLKPFERDISTEIYQAGSTPCNGVKGFNCYFPLQSYGFQPTYGVGYQPYRVVVLSFELLHAPATVCGPKKSTNLVKNKCVNFNFNGLTGTGVLTESNKKFLPFQQFGRDIADTTDAVRDPQTLEILDITPCSFGGVSVITPGTNTSNQVAVLYQGVNCTEVPVAIHADQLTPTWRVYSTGSNVFQTRAGCLIGAEHVNNSYECDIPIGAGICASYQTQTNSHGSASSVASQSIIAYTMSLGAENSVAYSNNSIAIPTNFTISVTTEILPVSMTKTSVDCTMYICGDSTECSNLLLQYGSFCTQLNRALTGIAVEQDKNTQEVFAQVKQIYKTPPIKDFGGFNFSQILPDPSKPSKRSPIEDLLFNKVTLADAGFIKQYGDCLGDIAARDLICAQKFNGLTVLPPLLTDEMIAQYTSALLAGTITSGWTFGAGPALQIPFPMQMAYRFNGIGVTQNVLYENQKLIANQFNSAIGKIQDSLSSTPSALGKLQNVVNQNAQALNTLVKQLSSNFGAISSVLNDILSRLDPPEAEVQIDRLITGRLQSLQTYVTQQLIRAAEIRASANLAATKMSECVLGQSKRVDFCGKGYHLMSFPQSAPHGVVFLHVTYVPAQEKNFTTAPAICHDGKAHFPREGVFVSNGTHWFVTQRNFYEPQIITTDNTFVSGNCDVVIGIVNNTVYDPLQPELDSFKEELDKYFKNHTSPDVDLGDISGINASVVNIQKEIDRLNEVAKNLNESLIDLQELGKYGSGSGSGSGSGSGSGSGSGSGSGSGSGSGSGSMGGWSSKPRQGMGTNLSVPNPLGFFPDHQLDPAFGANSNNPDWDFNPNKDQWPEANQVGAGAFGPGFTPPHGGLLGWSPQAQGILTTVPAAPPPASTNRQSGRQPTPISPPLRDSHPQAMQWNSTTFHQALLDPRVRGLYFPAGGSSSGTVNPVPTTASPISSIFSRTGDPAPNMENTTSGFLGPLLVLQAGFFLLTRILTIPQSLDSWWTSLNFLGGAPTCPGQNSQSPTSNHSPTSCPPICPGYRWMCLRRFIIFLFILLLCLIFLLVLLDYQGMLPVCPLLPGTSTTSTGPCKTCTIPAQGTSMFPSCCCTKPSDGNCTCIPIPSSWAFARFLWEWASVRFSWLSLLVPFVQWFVGLSPTVWLSVIWMMWYWGPSLYNILSPFLPLLPIFFCLWVYI

SEQ ID NO: 322 - protein, 1188 aa, synthetic construct
  REGION 1..1188: note = Recombinant Sequence
MFIFLLFLTLTSGSDLDRCTTFDDVQAPNYTQHTSSMRGVYYPDEIFRSDTLYLTQDLFLPFYSNVTGFHTINHTFGNPVIPFKDGIYFAATEKSNVVRGWVFGSTMNNKSQSVIIINNSTNVVIRACNFELCDNPFFAVSKPMGTQTHTMIFDNAFNCTFEYISDAFSLDVSEKSGNFKHLREFVFKNKDGFLYVYKGYQPIDVVRDLPSGFNTLKPIFKLPLGINITNFRAILTAFSPAQDIWGTSAAAYFVGYLKPTTFMLKYDENGTITDAVDCSQNPLAELKCSVKSFEIDKGIYQTSNFRVVPSGDVVRFPNITNLCPFGEVFNATKFPSVYAWERKKISNCVADYSVLYNSTFFSTFKCYGVSATKLNDLCFSNVYADSFVVKGDDVRQIAPGQTGVIADYNYKLPDDFMGCVLAWNTRNIDATSTGNYNYKYRYLRHGKLRPFERDISNVPFSPDGKPCTPPALNCYWPLNDYGFYTTTGIGYQPYRVVVLSFELLNAPATVCGPKLSTDLIKNQCVNFNFNGLTGTGVLTPSSKRFQPFQQFGRDVSDFTDSVRDPKTSEILDISPCAFGGVSVITPGTNASSEVAVLYQDVNCTNVSAAIHADQLTPAWRIYSTGNNVFQTQAGCLIGAEHVDTSYECDIPIGAGICASYHTVSLLRSTSQKSIVAYTMSLGADSSIAYSNNTIAIPTNFSISITTEVMPVSMAKTSVDCNMYICGDSTECANLLLQYGSFCTQLNRALSGIAAEQDRNTREVFAQVKQMYKTPTLKYFGGFNFSQILPDPLKPTKRSPIEDLLFNKVTLADAGFMKQYGECLGDINARDLICAQKFNGLTVLPPLLTDDMIAAYTAALVSGTATAGWTFGAGPALQIPFPMQMAYRFNGIGVTQNVLYENQKQIANQFNKAISQIQESLTTTPTALGKLQDVVNQNAQALNTLVKQLSSNFGAISSVLNDILSRLDPPEAEVQIDRLITGRLQSLQTYVTQQLIRAAEIRASANLAATKMSECVLGQSKRVDFCGKGYHLMSFPQAAPHGVVFLHVTYVPSQERNFTTAPAICHEGKAYFPREGVFVFNGTSWFITQRNFFSPQIITTDNTFVSGNCDVVIGIINNTVYDPLQPELDSFKGELDKYFKNHTSPDVDLGDISGINASVVNIQKEIDRLNEVAKNLNESLIDLQELGKY

SEQ ID NO: 323 - protein, 1293 aa, synthetic construct
  REGION 1..1293: note = Recombinant Sequence
MIHSVFLLMFLLTPTESYVDVGPDSVKSACIEVDIQQTFFDKTWPRPIDVSKADGIIYPQGRTYSNITITYQGLFPYQGDHGDMYVYSAGHATGTTPQKLFVANYSQDVKQFANGFVVRIGAAANSTGTVIISPSTSATIRKIYPAFMLGSSVGNFSDGKMGRFFNHTLVLLPDGCGTLLRAFYCILEPRSGNHCPAGNSYTSFATYHTPATDCSDGNYNRNASLNSFKEYFNLRNCTFMYTYNITEDEILEWFGITQTAQGVHLFSSRYVDLYGGNMFQFATLPVYDTIKYYSIIPHSIRSIQSDRKAWAAFYVYKLQPLTFLLDFSVDGYIRRAIDCGFNDLSQLHCSYESFDVESGVYSVSSFEAKPSGSVVEQAEGVECDFSPLLSGTPPQVYNFKRLVFTNCNYNLTKLLSLFSVNDFTCSQISPAAIASNCYSSLILDYFSYPLSMKSDLSVSSAGPISQFNYKQSFSNPTCLILATVPHNLTTITKPLKYSYINKCSRLLSDDRTEVPQLVNANQYSPCVSIVPSTVWEDGDYYRKQLSPLEGGGWLVASGSTVAMTEQLQMGFGITVQYGTDTNSVCPKLEFANDTKIASQLGNCVEYSLYGVSGRGVFQNCTAVGVRQQRFVYDAYQNLVGYYSDDGNYYCLRACVSVPVSVIYDKETKTHATLFGSVACEHISSTMSQYSRSTRSMLKRRDSTYGPLQTPVGCVLGLVNSSLFVEDCKLPLGQSLCALPDTPSTLTPRSVRVPGEMRLASIAFNHPIQVDQLNSSYFKLSIPTNFSFGVTQEYIQTTIQKVTVDCKQYVCNGFQKCEQLLREYGQFCSKINQALHGANLRQDDSVRNLFASVKSSQSSPIIPGFGGDFNLTLLEPVSISTGSRSAPSAIEDLLFDKVTIADPGYMQGYDDCMQQGPASARDLICAQYVAGYKVLPPLMDVNMEAAYTSSLLGSIAGVGWPAGLSSFAAPPFAQSIFYRLNGVGITQQVLSENQKLIANKFNQALGAMQTGFTTTPEAFQKVQDAVNNNAQALSKLASELSNTFGAISASIGDIIQRLDPPEQDAQIDRLINGRLTTLNAFVAQQLVRSESAALSAQLAKDKVNECVKAQSKRSGFCGQGTHIVSFVVNAPNGLYFMHVGYYPSNHIEVVSAYGLCDAANPTNCIAPVNGYFIKTNNTRIVDEWSYTGSSFYAPEPITSLNTKYVAPQVTYQNISTNLPPPLLGNSTGIDFQDELDEFFKNVSTSIPNFGSLTQINTTLLDLTYEMLSLQQVVKALNESYIDLKELGNYTYYNK

SEQ ID NO: 324 - protein, 1112 aa, synthetic construct
  REGION 1..1112: note = Recombinant Sequence
MFVLLVAYALLHIAGCQTTNGMNTSHSVCNGCVGHSENVFAVESGGYIPSNFAFNNWFLLTNTSSVVDGVVRSFQPLLLNCLWSVSGSRLTTGFVYFNGTGRGACKGFYSNASSDVIRYNINFEENLRRGTILFKTSYGAVVFYCTNNTLVSGDAHIPSGTVLGNFYCFVNTTIGNETTSAFVGALPKTVREFVISRTGHFYINGYRYFSLGNVEAVNFNVTNAATTVCTVALASYADVLVNVSQTAIANIIYCNSVINRLRCDQLSFDVPDGFYSTSPIQSVELPVSIVSLPVYHKHTFIVLYVNFELRRGPGRCYNCRPAVVNITLANFNETKGPLCVDTSHFTTQFFGVKFDRWSASINTGNCPFSFGKVNNFVKFGSVCFSLKDIPGGCAMPIMANLANLNSHNIGSLYVSWSDGDVITGVPKPVEGVSSFMNVTLNKCTKYNIYDVSGVGVIRISNDTFLNGITYTSTSGNLLGFKDVTNGTIYSITPCNPPDQLVVYQQAVVGAMLSENFTSYGFSNVVEMPKFFYASNGTYNCTDAVLTYSSFGVCADGSIIAVQPRNVSYDSVSAIVTANLSIPSNWTTSVQVEYLQITSTPIVVDCSTYVCNGNVRCVELLKQYTSACKTIEDALRNSAMLESADVSEMLTFDKKAFTLANVSSFGDYNLSSVIPSLPRSGSRVPGRSAIEDILFSKLVTSGLGTVDADYKKCTKGLSIADLACAQYYNGIMVLPGVADAERMAMYTGSLIGGIALGGLTSPASIPFSLAIQSRLNYVALQTDVLQENQKILAASFNKAMTNIVDAFTGVNDPITQTSQALQTVATALNKIQDVVNQQGNSLNHLTSQLRQNFQAISSSIQAIYDRLDPPQADQQVDRLITGRLAALNVFVSHTLTKYTEVRASRQLAQQKVNECVKSQSKRYGFCGNGTHIFSLVNAAPEGLVFLHTVLLPTQYKDVEAWSGLCVDGRNGYVLRQPNLALYKEGNYYRITSRIMFEPRIPTIADFVQIENCNVTFVNISRSELQTIVPEYIDVNKTLQELSYKLPNYTVPDLVVEQYNQTILNLTSEISTLENKSAELNYTVQKLQTLIDNINSTLVDLKWLNRVETYIKWP

SEQ ID NO: 325 - protein, 1296 aa, synthetic construct
  REGION 1..1296: note = Recombinant Sequence
MKLFLILLVLPLASCFFTCNSNANLSMLQLGVPDNSSTIVTGLLPTHWFCANQSTSVYSANGFFYIDVGNHRSAFALHTGYYDVNQYYIYVTNEIGLNASVTLKICKFGINTTFDFLSNSSSSFDCIVNLLFTEQLGAPLGITISGETVRLHLYNVTRTFYVPAAYKLTKLSVKCYFNYSCVFSVVNATVTVNVTTHNGRVVNYTVCDDCNGYTDNIFSVQQDGRIPNGFPFNNWFLLTNGSTLVDGVSRLYQPLRLTCLWPVPGLKSSTGFVYFNATGSDVNCNGYQHNSVADVMRYNLNFSANSVDNLKSGVIVFKTLQYDVLFYCSNSSSGVLDTTIPFGPSSQPYYCFINSTINTTHVSTFVGILPPTVREIVVARTGQFYINGFKYFDLGFIEAVNFNVTTASATDFWTVAFATFVDVLVNVSATKIQNLLYCDSPFEKLQCEHLQFGLQDGFYSANFLDDNVLPETYVALPIYYQHTDINFTATASFGGSCYVCKPHQVNISLNGNTSVCVRTSHFSIRYIYNRVKSGSPGDSSWHIYLKSGTCPFSFSKLNNFQKFKTICFSTVEVPGSCNFPLEATWHYTSYTIVGALYVTWSEGNSITGVPYPVSGIREFSNLVLNNCTKYNIYDYVGTGIIRSSNQSLAGGITYVSNSGNLLGFKNVSTGNIFIVTPCNQPDQVAVYQQSIIGAMTAVNESRYGLQNLLQLPNFYYVSNGGNNCTTAVMTYSNFGICADGSLIPVRPRNSSDNGISAIITANLSIPSNWTTSVQVEYLQITSTPIVVDCATYVCNGNPRCKNLLKQYTSACKTIEDALRLSAHLETNDVSSMLTFDSNAFSLANVTSFGDYNLSSVLPQRNIRSSRIAGRSPLEDLLFSKVVTSGLGTVDVDYKSCTKGLSIADLACAQYYNGIMVLPGVADAERMAMYTGSLIGGMVLGGLTSAPAIPFSLALQARLNYVALQTDVLQENQKILAASFNKAINNIVASFSSVNDPITQTAEAIHTVTIALNKIQDVVNQQGSALNHLTSQLRHNFQAISNSIQAIYDRLDPPQADQQVDRLITGRLAALNAFVSQVLNKYTEVRSSRRLAQQKVNECVKSQSNRYGFCGNGTHIFSIVNSAPDGLLFLHTVLLPTDYKNVKAWSGICVDGIYGYVLRQPNLVLYSDNGVFRVTSRIMFQPRLPVLSDFVQIYNCNVTFVNISRVELHTVIPDYVDVNKTLQEFAQNLPKYVKPNFDLTPFNLTYLNLSSELKQLEAKTASLFQTTVELQGLIDQINSTYVDLKLLNRFENYIKWP

SEQ ID NO: 326 - protein, 1302 aa, synthetic construct
  REGION 1..1302: note = Recombinant Sequence
MFLILLISLPTAFAVIGDLNCPLDPKLKGSFNNRDTGSPSISTDTVDVTNGLGTYYVLDRVYLNTTLFLNGYYPTSGSTYRNMALKGTDLLSTLWFKPPFLSDFINGIFAKVKNTKVFKDGVMYSEFPAITIGSTFVNTSYSVVVQPRTINSTQDGVNKLQGLLEVSVCQYNMCEHPHTICHPNLGNHFKELWHLDTGVVSCLYKRNFTYDVNATYLYFHFYQEGGTFYAYFTDTGFVTKFLFNVYLGMALSHYYVMPLTCISRRDIGFTLEYWVTPLTPRQYLLAFNQDGIIFNAVDCMSDFMSEIKCKTQSIAPPTGVYELNGYTVQPIADVYRRKPDLPNCNIEAWLNDKSVPSPLNWERKTFSNCNFNMSSLMSFIQADSFTCNNIDAAKIYGMCFSSITIDKFAIPNRRKVDLQLGNLGYLQSSNYRIDTTATSCQLYYNLPAANVSVSRFNPSTWNKRFGFIEDSVFVPQPTGVFTNHSVVYAQHCFKAPKNFCPCSSCPGKNNGIGTCPAGTNSLTCDNLCTLDPITFKAPDTYKCPQTKSLVGIGEHCSGLAVKSDYCGNNSCTCQPQAFLGWSADSCLQGDKCNIFANFILHDVNNGLTCSTDLQKANTEIELGVCVNYDLYGISGQGIFVEVNATYYNSWQNLLYDSNGNLYGFRDYITNRTFMIHSCYSGRVSAAYHANSPEPALLFRNIKCNYVFNNSLTRQLQPINYSFDSYLGCVVNAYNSTAISVQTCDLTVGSGYCVDYSKNRRSRRAITTGYRFTNFEPFTVNSVNDSLEPVGGLYEIQIPSEFTIGNMEEFIQTSSPKVTIDCAAFVCGDYAACKLQLVEYGSFCDNINAILTEVNELLDTTQLQVANSLMNGVTLSTKLKDGVNFNVDDINFSPVLGCLGSECSKPSSRSAIEDLLFDKVKLSDVGFVEAYNNCTGGAEIRDLICVQSYKGIKVLPPLLSENQISGYTLAATSASLFPPWTAPAGVPFYLNVQYRINGLGVTMDVLSQNQKLIANAFNNALHAIQQGFDPTNSALVKIQAVVNANSEALNNLLQQLSNRFGAISASLQEILSRLDPPEAEAQIDRLINGRLTALNAYVSQQLSDSTLVKFSAAQAMEKVNECVKSQSSRINFCGNGNHIISLVQNAPYGLYFIHFNYVPTKYVTAKVSPGLCIAGNRGIAPKSGYFVNVNNTWMYTGSGYYYPEPITENNVVVMSTCAVNYTKAPYVMLNTSIPNLPDFKEELGQWFKNQTSVAPDLSLDYINVTFLDLQVEMNRLQEAIKVLNHSYINLKDIGTYEYYVKWP

SEQ ID NO: 327 - protein, 1300 aa, synthetic construct
  REGION 1..1300: note = Recombinant Sequence
MLLIIFILPTTLAVIGDFNCTNFAINDKNTTVPRISEYVVDVSYGLGTYYILDRVYLNTTILFTGYFPKSGANFRDLSLKGTTYLSTLWYQKPFLSDFNNGIFSRVKNTKLYVNKTLYSEFSTIVIGSVFINNSYTIVVQPHNGVLEITACQYTMCEYPHTICKSKGSSRNESWHFDKSEPLCLFKKNFTYNVSTDFLYFHFYQERGTFYAYYADSGMPTTFLFSLYLGTLLSHYYVLPLTCNAISSNTDNETLQYWVTPLSKRQYLLKFDNRGVITNAVDCSSSFFSEIQCKTKSLLPNTGVYDLSGFTVKPVATVHRRIPDLPDCDIDKWLNNFNVPSPLNWERKIFSNCNFNLSTLLRLVHTDSFSCNNFDESKIYGSCFKSIVLDKFAIPNSRRSDLQLGSSGFLQSSNYKIDTTSSSCQLYYSLPAINVTINNYNPSSWNRRYGFNNFNLSSHSVVYSRYCFSVNNTFCPCAKPSFASSCKSHKPPSASCPIGTNYRSCESTTVLDHTDWCRCSCLPDPITAYDPRSCSQKKSLVGVGEHCAGFGVDEEKCGVLDGSYNVSCLCSTDAFLGWSYDTCVSNNRCNIFSNFILNGINSGTTCSNDLLQPNTEVYTDVCVDYDLYGITGQGIFKEVSAVYYNSWQNLLYDSNGNIIGFKDFVTNKTYNIFPCYAGRVSAAFHQNASSLALLYRNLKCSYVLNNISLATQPYFDSYLGCVFNADNLTDYSVSSCALRMGSGFCVDYNSPSFSSSRRKRRSISASYRFVTFEPFNVSFVNDSIESVGGLYEIKIPTNFTIVGQEEFIQTNSPKVTIDCSLFVCSNYAACHDLLSEYGTFCDNINSILDEVNGLLDTTQLHVADTLMQGVTLSSNLNTNLHFDVDNINFKSLVGCLGPHCGSPSRSFFEDLLFDKVKLSDVGFVEAYNNCTGGSEIRDLLCVQSFNGIKVLPPILSESQISGYTTAATVAAMFPPWSAPAGIPFSLNVQYRINGLGVTMDVLNKNQKLIATAFNNALLSIQNGFSPTNSALAKIQSVVNSNAQALNSLLQQLFNKFGAISSSLQEILSRLDPPEAQVQIDRLINGRLTALNAYVSQQLSDISLVKFGAALAMEKVNECVKSQSPRINFCGNGNHILSLVQNAPYGLLFMHFSYKPISFKTVLVSPGLCISGDVGIAPKQGYFIKHNDHWMFTGSSYYYPEPISDKNVVFMNTCSVNFTKAPLVYLNHSVPKLSDFESELSHWFKNQTSIAPNLTLNLHTINATFLDLYYEMNLIQESIKSLNNSYINLKDIGTYEMYVKWP

SEQ ID NO: 328 - protein, 1188 aa, synthetic construct
  REGION 1..1188: note = Recombinant Sequence
MFIFLLFLTLTSGSDLDRCTTFDDVQAPNYTQHTSSMRGVYYPDEIFRSDTLYLTQDLFLPFYSNVTGFHTINHTFGNPVIPFKDGIYFAATEKSNVVRGWVFGSTMNNKSQSVIIINNSTNVVIRACNFELCDNPFFAVSKPMGTQTHTMIFDNAFNCTFEYISDAFSLDVSEKSGNFKHLREFVFKNKDGFLYVYKGYQPIDVVRDLPSGFNTLKPIFKLPLGINITNFRAILTAFSPAQDIWGTSAAAYFVGYLKPTTFMLKYDENGTITDAVDCSQNPLAELKCSVKSFEIDKGIYQTSNFRVVPSGDVVRFPNITNLCPFGEVFNATKFPSVYAWERKKISNCVADYSVLYNSTFFSTFKCYGVSATKLNDLCFSNVYADSFVVKGDDVRQIAPGQTGVIADYNYKLPDDFMGCVLAWNTRNIDATSTGNYNYKYRYLRHGKLRPFERDISNVPFSPDGKPCTPPALNCYWPLNDYGFYTTTGIGYQPYRVVVLSFELLNAPATVCGPKLSTDLIKNQCVNFNFNGLTGTGVLTPSSKRFQPFQQFGRDVSDFTDSVRDPKTSEILDISPCAFGGVSVITPGTNASSEVAVLYQDVNCTNVSAAIHADQLTPAWRIYSTGNNVFQTQAGCLIGAEHVDTSYECDIPIGAGICASYHTVSLLSSTSQKSIVAYTMSLGADSSIAYSNNTIAIPTNFSISITTEVMPVSMAKTSVDCNMYICGDSTECANLLLQYGSFCTQLNRALSGIAAEQDRNTREVFAQVKQMYKTPTLKYFGGFNFSQILPDPLKPTKRSPIEDLLFNKVTLADAGFMKQYGECLGDINARDLICAQKFNGLTVLPPLLTDDMIAAYTAALVSGTATAGWTFGAGPALQIPFPMQMAYRFNGIGVTQNVLYENQKQIANQFNKAISQIQESLTTTPTALGKLQDVVNQNAQALNTLVKQLSSNFGAISSVLNDILSRLDPPEAEVQIDRLITGRLQSLQTYVTQQLIRAAEIRASANLAATKMSECVLGQSKRVDFCGKGYHLMSFPQAAPHGVVFLHVTYVPSQERNFTTAPAICHEGKAYFPREGVFVFNGTSWFITQRNFFSPQIITTDNTFVSGNCDVVIGIINNTVYDPLQPELDSFKGELDKYFKNHTSPDVDLGDISGINASVVNIQKEIDRLNEVAKNLNESLIDLQELGKY

SEQ ID NO: 329 - protein, 1294 aa, synthetic construct
  REGION 1..1294: note = Recombinant Sequence
MIHSVFLLMFLLTPTESYVDVGPDSVKSACIEVDIQQTFFDKTWPRPIDVSKADGIIYPQGRTYSNITITYQGLFPYQGDHGDMYVYSAGHATGTTPQKLFVANYSQDVKQFANGFVVRIGAAANSTGTVIISPSTSATIRKIYPAFMLGSSVGNFSDGKMGRFFNHTLVLLPDGCGTLLRAFYCILEPRSGNHCPAGNSYTSFATYHTPATDCSDGNYNRNASLNSFKEYFNLRNCTFMYTYNITEDEILEWFGITQTAQGVHLFSSRYVDLYGGNMFQFATLPVYDTIKYYSIIPHSIRSIQSDRKAWAAFYVYKLQPLTFLLDFSVDGYIRRAIDCGFNDLSQLHCSYESFDVESGVYSVSSFEAKPSGSVVEQAEGVECDFSPLLSGTPPQVYNFKRLVFTNCNYNLTKLLSLFSVNDFTCSQISPAAIASNCYSSLILDYFSYPLSMKSDLSVSSAGPISQFNYKQSFSNPTCLILATVPHNLTTITKPLKYSYINKCSRLLSDDRTEVPQLVNANQYSPCVSIVPSTVWEDGDYYRKQLSPLEGGGWLVASGSTVAMTEQLQMGFGITVQYGTDTNSVCPKLEFANDTKIASQLGNCVEYSLYGVSGRGVFQNCTAVGVRQQRFVYDAYQNLVGYYSDDGNYYCLRACVSVPVSVIYDKETKTHATLFGSVACEHISSTMSQYSRSTRSMLKRRDSTYGPLQTPVGCVLGLVNSSLFVEDCKLPLGQSLCALPDTPSTLTPASVGSVPGEMRLASIAFNHPIQVDQLNSSYFKLSIPTNFSFGVTQEYIQTTIQKVTVDCKQYVCNGFQKCEQLLREYGQFCSKINQALHGANLRQDDSVRNLFASVKSSQSSPIIPGFGGDFNLTLLEPVSISTGSASAPSAIEDLLFDKVTIADPGYMQGYDDCMQQGPASARDLICAQYVAGYKVLPPLMDVNMEAAYTSSLLGSIAGVGWPAGLSSFAAPPFAQSIFYRLNGVGITQQVLSENQKLIANKFNQALGAMQTGFTTTPEAFQKVQDAVNNNAQALSKLASELSNTFGAISASIGDIIQRLDPPEQDAQIDRLINGRLTTLNAFVAQQLVRSESAALSAQLAKDKVNECVKAQSKRSGFCGQGTHIVSFVVNAPNGLYFMHVGYYPSNHIEVVSAYGLCDAANPTNCIAPVNGYFIKTNNTRIVDEWSYTGSSFYAPEPITSLNTKYVAPQVTYQNISTNLPPPLLGNSTGIDFQDELDEFFKNVSTSIPNFGSLTQINTTLLDLTYEMLSLQQVVKALNESYIDLKELGNYTYYNK

SEQ ID NO: 330 - protein, 1112 aa, synthetic construct
  REGION 1..1112: note = Recombinant Sequence
MFVLLVAYALLHIAGCQTTNGMNTSHSVCNGCVGHSENVFAVESGGYIPSNFAFNNWFLLTNTSSVVDGVVRSFQPLLLNCLWSVSGSRLTTGFVYFNGTGRGACKGFYSNASSDVIRYNINFEENLRRGTILFKTSYGAVVFYCTNNTLVSGDAHIPSGTVLGNFYCFVNTTIGNETTSAFVGALPKTVREFVISRTGHFYINGYRYFSLGNVEAVNFNVTNAATTVCTVALASYADVLVNVSQTAIANIIYCNSVINRLRCDQLSFDVPDGFYSTSPIQSVELPVSIVSLPVYHKHTFIVLYVNFELRRGPGRCYNCRPAVVNITLANFNETKGPLCVDTSHFTTQFFGVKFDRWSASINTGNCPFSFGKVNNFVKFGSVCFSLKDIPGGCAMPIMANLANLNSHNIGSLYVSWSDGDVITGVPKPVEGVSSFMNVTLNKCTKYNIYDVSGVGVIRISNDTFLNGITYTSTSGNLLGFKDVTNGTIYSITPCNPPDQLVVYQQAVVGAMLSENFTSYGFSNVVEMPKFFYASNGTYNCTDAVLTYSSFGVCADGSIIAVQPGNVSYDSVSAIVTANLSIPSNWTTSVQVEYLQITSTPIVVDCSTYVCNGNVRCVELLKQYTSACKTIEDALRNSAMLESADVSEMLTFDKKAFTLANVSSFGDYNLSSVIPSLPRSGSGVPGSSAIEDILFSKLVTSGLGTVDADYKKCTKGLSIADLACAQYYNGIMVLPGVADAERMAMYTGSLIGGIALGGLTSPASIPFSLAIQSRLNYVALQTDVLQENQKILAASFNKAMTNIVDAFTGVNDPITQTSQALQTVATALNKIQDVVNQQGNSLNHLTSQLRQNFQAISSSIQAIYDRLDPPQADQQVDRLITGRLAALNVFVSHTLTKYTEVRASRQLAQQKVNECVKSQSKRYGFCGNGTHIFSLVNAAPEGLVFLHTVLLPTQYKDVEAWSGLCVDGRNGYVLRQPNLALYKEGNYYRITSRIMFEPRIPTIADFVQIENCNVTFVNISRSELQTIVPEYIDVNKTLQELSYKLPNYTVPDLVVEQYNQTILNLTSEISTLENKSAELNYTVQKLQTLIDNINSTLVDLKWLNRVETYIKWP

SEQ ID NO: 331 - protein, 1296 aa, synthetic construct
  REGION 1..1296: note = Recombinant Sequence
MKLFLILLVLPLASCFFTCNSNANLSMLQLGVPDNSSTIVTGLLPTHWFCANQSTSVYSANGFFYIDVGNHRSAFALHTGYYDVNQYYIYVTNEIGLNASVTLKICKFGINTTFDFLSNSSSSFDCIVNLLFTEQLGAPLGITISGETVRLHLYNVTRTFYVPAAYKLTKLSVKCYFNYSCVFSVVNATVTVNVTTHNGRVVNYTVCDDCNGYTDNIFSVQQDGRIPNGFPFNNWFLLTNGSTLVDGVSRLYQPLRLTCLWPVPGLKSSTGFVYFNATGSDVNCNGYQHNSVADVMRYNLNFSANSVDNLKSGVIVFKTLQYDVLFYCSNSSSGVLDTTIPFGPSSQPYYCFINSTINTTHVSTFVGILPPTVREIVVARTGQFYINGFKYFDLGFIEAVNFNVTTASATDFWTVAFATFVDVLVNVSATKIQNLLYCDSPFEKLQCEHLQFGLQDGFYSANFLDDNVLPETYVALPIYYQHTDINFTATASFGGSCYVCKPHQVNISLNGNTSVCVRTSHFSIRYIYNRVKSGSPGDSSWHIYLKSGTCPFSFSKLNNFQKFKTICFSTVEVPGSCNFPLEATWHYTSYTIVGALYVTWSEGNSITGVPYPVSGIREFSNLVLNNCTKYNIYDYVGTGIIRSSNQSLAGGITYVSNSGNLLGFKNVSTGNIFIVTPCNQPDQVAVYQQSIIGAMTAVNESRYGLQNLLQLPNFYYVSNGGNNCTTAVMTYSNFGICADGSLIPVGPGNSSDNGISAIITANLSIPSNWTTSVQVEYLQITSTPIVVDCATYVCNGNPRCKNLLKQYTSACKTIEDALRLSAHLETNDVSSMLTFDSNAFSLANVTSFGDYNLSSVLPQRNIGSSGIAGSSPLEDLLFSKVVTSGLGTVDVDYKSCTKGLSIADLACAQYYNGIMVLPGVADAERMAMYTGSLIGGMVLGGLTSAPAIPFSLALQARLNYVALQTDVLQENQKILAASFNKAINNIVASFSSVNDPITQTAEAIHTVTIALNKIQDVVNQQGSALNHLTSQLRHNFQAISNSIQAIYDRLDPPQADQQVDRLITGRLAALNAFVSQVLNKYTEVRSSRRLAQQKVNECVKSQSNRYGFCGNGTHIFSIVNSAPDGLLFLHTVLLPTDYKNVKAWSGICVDGIYGYVLRQPNLVLYSDNGVFRVTSRIMFQPRLPVLSDFVQIYNCNVTFVNISRVELHTVIPDYVDVNKTLQEFAQNLPKYVKPNFDLTPFNLTYLNLSSELKQLEAKTASLFQTTVELQGLIDQINSTYVDLKLLNRFENYIKWP

SEQ ID NO: 332 - protein, 1302 aa, synthetic construct
  REGION 1..1302: note = Recombinant Sequence
MFLILLISLPTAFAVIGDLNCPLDPKLKGSFNNRDTGSPSISTDTVDVTNGLGTYYVLDRVYLNTTLFLNGYYPTSGSTYRNMALKGTDLLSTLWFKPPFLSDFINGIFAKVKNTKVFKDGVMYSEFPAITIGSTFVNTSYSVVVQPRTINSTQDGVNKLQGLLEVSVCQYNMCEHPHTICHPNLGNHFKELWHLDTGVVSCLYKRNFTYDVNATYLYFHFYQEGGTFYAYFTDTGFVTKFLFNVYLGMALSHYYVMPLTCISRRDIGFTLEYWVTPLTPRQYLLAFNQDGIIFNAVDCMSDFMSEIKCKTQSIAPPTGVYELNGYTVQPIADVYRRKPDLPNCNIEAWLNDKSVPSPLNWERKTFSNCNFNMSSLMSFIQADSFTCNNIDAAKIYGMCFSSITIDKFAIPNRRKVDLQLGNLGYLQSSNYRIDTTATSCQLYYNLPAANVSVSRFNPSTWNKRFGFIEDSVFVPQPTGVFTNHSVVYAQHCFKAPKNFCPCSSCPGKNNGIGTCPAGTNSLTCDNLCTLDPITFKAPDTYKCPQTKSLVGIGEHCSGLAVKSDYCGNNSCTCQPQAFLGWSADSCLQGDKCNIFANFILHDVNNGLTCSTDLQKANTEIELGVCVNYDLYGISGQGIFVEVNATYYNSWQNLLYDSNGNLYGFRDYITNRTFMIHSCYSGRVSAAYHANSPEPALLFRNIKCNYVFNNSLTRQLQPINYSFDSYLGCVVNAYNSTAISVQTCDLTVGSGYCVDYSKNSGSGSAITTGYRFTNFEPFTVNSVNDSLEPVGGLYEIQIPSEFTIGNMEEFIQTSSPKVTIDCAAFVCGDYAACKLQLVEYGSFCDNINAILTEVNELLDTTQLQVANSLMNGVTLSTKLKDGVNFNVDDINFSPVLGCLGSECSKPSSASAIEDLLFDKVKLSDVGFVEAYNNCTGGAEIRDLICVQSYKGIKVLPPLLSENQISGYTLAATSASLFPPWTAPAGVPFYLNVQYRINGLGVTMDVLSQNQKLIANAFNNALHAIQQGFDPTNSALVKIQAVVNANSEALNNLLQQLSNRFGAISASLQEILSRLDPPEAEAQIDRLINGRLTALNAYVSQQLSDSTLVKFSAAQAMEKVNECVKSQSSRINFCGNGNHIISLVQNAPYGLYFIHFNYVPTKYVTAKVSPGLCIAGNRGIAPKSGYFVNVNNTWMYTGSGYYYPEPITENNVVVMSTCAVNYTKAPYVMLNTSIPNLPDFKEELGQWFKNQTSVAPDLSLDYINVTFLDLQVEMNRLQEAIKVLNHSYINLKDIGTYEYYVKWP

SEQ ID NO: 333 - protein, 1300 aa, synthetic construct
  REGION 1..1300: note = Recombinant Sequence
MLLIIFILPTTLAVIGDFNCTNFAINDKNTTVPRISEYVVDVSYGLGTYYILDRVYLNTTILFTGYFPKSGANFRDLSLKGTTYLSTLWYQKPFLSDFNNGIFSRVKNTKLYVNKTLYSEFSTIVIGSVFINNSYTIVVQPHNGVLEITACQYTMCEYPHTICKSKGSSRNESWHFDKSEPLCLFKKNFTYNVSTDFLYFHFYQERGTFYAYYADSGMPTTFLFSLYLGTLLSHYYVLPLTCNAISSNTDNETLQYWVTPLSKRQYLLKFDNRGVITNAVDCSSSFFSEIQCKTKSLLPNTGVYDLSGFTVKPVATVHRRIPDLPDCDIDKWLNNFNVPSPLNWERKIFSNCNFNLSTLLRLVHTDSFSCNNFDESKIYGSCFKSIVLDKFAIPNSRRSDLQLGSSGFLQSSNYKIDTTSSSCQLYYSLPAINVTINNYNPSSWNRRYGFNNFNLSSHSVVYSRYCFSVNNTFCPCAKPSFASSCKSHKPPSASCPIGTNYRSCESTTVLDHTDWCRCSCLPDPITAYDPRSCSQKKSLVGVGEHCAGFGVDEEKCGVLDGSYNVSCLCSTDAFLGWSYDTCVSNNRCNIFSNFILNGINSGTTCSNDLLQPNTEVYTDVCVDYDLYGITGQGIFKEVSAVYYNSWQNLLYDSNGNIIGFKDFVTNKTYNIFPCYAGRVSAAFHQNASSLALLYRNLKCSYVLNNISLATQPYFDSYLGCVFNADNLTDYSVSSCALRMGSGFCVDYNSPSFSSSGSKGSSISASYRFVTFEPFNVSFVNDSIESVGGLYEIKIPTNFTIVGQEEFIQTNSPKVTIDCSLFVCSNYAACHDLLSEYGTFCDNINSILDEVNGLLDTTQLHVADTLMQGVTLSSNLNTNLHFDVDNINFKSLVGCLGPHCGSPSASFFEDLLFDKVKLSDVGFVEAYNNCTGGSEIRDLLCVQSFNGIKVLPPILSESQISGYTTAATVAAMFPPWSAPAGIPFSLNVQYRINGLGVTMDVLNKNQKLIATAFNNALLSIQNGFSPTNSALAKIQSVVNSNAQALNSLLQQLFNKFGAISSSLQEILSRLDPPEAQVQIDRLINGRLTALNAYVSQQLSDISLVKFGAALAMEKVNECVKSQSPRINFCGNGNHILSLVQNAPYGLLFMHFSYKPISFKTVLVSPGLCISGDVGIAPKQGYFIKHNDHWMFTGSSYYYPEPISDKNVVFMNTCSVNFTKAPLVYLNHSVPKLSDFESELSHWFKNQTSIAPNLTLNLHTINATFLDLYYEMNLIQESIKSLNNSYINLKDIGTYEMYVKWP

SEQ ID NO: 334 - protein, 1354 aa, synthetic construct
  REGION 1..1354: note = Recombinant Sequence
MFVLLVAYALLHIAGCQTTNGMNTSHSVCNGCVGHSENVFAVESGGYIPSNFAFNNWFLLTNTSSVVDGVVRSFQPLLLNCLWSVSGSRLTTGFVYFNGTGRGACKGFYSNASSDVIRYNINFEENLRRGTILFKTSYGAVVFYCTNNTLVSGDAHIPSGTVLGNFYCFVNTTIGNETTSAFVGALPKTVREFVISRTGHFYINGYRYFSLGNVEAVNFNVTNAATTVCTVALASYADVLVNVSQTAIANIIYCNSVINRLRCDQLSFDVPDGFYSTSPIQSVELPVSIVSLPVYHKHTFIVLYVNFELRRGPGRCYNCRPAVVNITLANFNETKGPLCVDTSHFTTQFFGVKFDRWSASINTGNCPFSFGKVNNFVKFGSVCFSLKDIPGGCAMPIMANLANLNSHNIGSLYVSWSDGDVITGVPKPVEGVSSFMNVTLNKCTKYNIYDVSGVGVIRISNDTFLNGITYTSTSGNLLGFKDVTNGTIYSITPCNPPDQLVVYQQAVVGAMLSENFTSYGFSNVVEMPKFFYASNGTYNCTDAVLTYSSFGVCADGSIIAVQPGNVSYDSVSAIVTANLSIPSNWTTSVQVEYLQITSTPIVVDCSTYVCNGNVRCVELLKQYTSACKTIEDALRNSAMLESADVSEMLTFDKKAFTLANVSSFGDYNLSSVIPSLPRSGSGVPGSSAIEDILFSKLVTSGLGTVDADYKKCTKGLSIADLACAQYYNGIMVLPGVADAERMAMYTGSLIGGIALGGLTSPASIPFSLAIQSRLNYVALQTDVLQENQKILAASFNKAMTNIVDAFTGVNDPITQTSQALQTVATALNKIQDVVNQQGNSLNHLTSQLRQNFQAISSSIQAIYDRLDPPQADQQVDRLITGRLAALNVFVSHTLTKYTEVRASRQLAQQKVNECVKSQSKRYGFCGNGTHIFSLVNAAPEGLVFLHTVLLPTQYKDVEAWSGLCVDGRNGYVLRQPNLALYKEGNYYRITSRIMFEPRIPTIADFVQIENCNVTFVNISRSELQTIVPEYIDVNKTLQELSYKLPNYTVPDLVVEQYNQTILNLTSEISTLENKSAELNYTVQKLQTLIDNINSTLVDLKWLNRVETYIKWPGSGSGSGSGSGSGSGSMENTTSGFLGPLLVLQAGFFLLTRILTIPQSLDSWWTSLNFLGGAPTCPGQNSRSPTSNHSPTSCPPICPGYRWMCLRRFIIFLFILLLCLIFLLVLLDYQGMLPVCPLLPGTSTTSTGPCKTCTNPANGTSMFPSCCCTKPSDGNCTCIPIPSSWAFARFLWEWASVRFSWLSFLVPFVQWFVGLSPTVWLSVMWMMWYWGPSLYNILSPFLPLLPIFFCLWVYI

SEQ ID NO: 335 - protein, 1538 aa, synthetic construct
  REGION 1..1538: note = Recombinant Sequence
MKLFLILLVLPLASCFFTCNSNANLSMLQLGVPDNSSTIVTGLLPTHWFCANQSTSVYSANGFFYIDVGNHRSAFALHTGYYDVNQYYIYVTNEIGLNASVTLKICKFGINTTFDFLSNSSSSFDCIVNLLFTEQLGAPLGITISGETVRLHLYNVTRTFYVPAAYKLTKLSVKCYFNYSCVFSVVNATVTVNVTTHNGRVVNYTVCDDCNGYTDNIFSVQQDGRIPNGFPFNNWFLLTNGSTLVDGVSRLYQPLRLTCLWPVPGLKSSTGFVYFNATGSDVNCNGYQHNSVADVMRYNLNFSANSVDNLKSGVIVFKTLQYDVLFYCSNSSSGVLDTTIPFGPSSQPYYCFINSTINTTHVSTFVGILPPTVREIVVARTGQFYINGFKYFDLGFIEAVNFNVTTASATDFWTVAFATFVDVLVNVSATKIQNLLYCDSPFEKLQCEHLQFGLQDGFYSANFLDDNVLPETYVALPIYYQHTDINFTATASFGGSCYVCKPHQVNISLNGNTSVCVRTSHFSIRYIYNRVKSGSPGDSSWHIYLKSGTCPFSFSKLNNFQKFKTICFSTVEVPGSCNFPLEATWHYTSYTIVGALYVTWSEGNSITGVPYPVSGIREFSNLVLNNCTKYNIYDYVGTGIIRSSNQSLAGGITYVSNSGNLLGFKNVSTGNIFIVTPCNQPDQVAVYQQSIIGAMTAVNESRYGLQNLLQLPNFYYVSNGGNNCTTAVMTYSNFGICADGSLIPVGPGNSSDNGISAIITANLSIPSNWTTSVQVEYLQITSTPIVVDCATYVCNGNPRCKNLLKQYTSACKTIEDALRLSAHLETNDVSSMLTFDSNAFSLANVTSFGDYNLSSVLPQRNIGSSGIAGSSPLEDLLFSKVVTSGLGTVDVDYKSCTKGLSIADLACAQYYNGIMVLPGVADAERMAMYTGSLIGGMVLGGLTSAPAIPFSLALQARLNYVALQTDVLQENQKILAASFNKAINNIVASFSSVNDPITQTAEAIHTVTIALNKIQDVVNQQGSALNHLTSQLRHNFQAISNSIQAIYDRLDPPQADQQVDRLITGRLAALNAFVSQVLNKYTEVRSSRRLAQQKVNECVKSQSNRYGFCGNGTHIFSIVNSAPDGLLFLHTVLLPTDYKNVKAWSGICVDGIYGYVLRQPNLVLYSDNGVFRVTSRIMFQPRLPVLSDFVQIYNCNVTFVNISRVELHTVIPDYVDVNKTLQEFAQNLPKYVKPNFDLTPFNLTYLNLSSELKQLEAKTASLFQTTVELQGLIDQINSTYVDLKLLNRFENYIKWPGSGSGSGSGSGSGSGSMENTTSGFLGPLLVLQAGFFLLTRILTIPQSLDSWWTSLNFLGGAPTCPGQNSRSPTSNHSPTSCPPICPGYRWMCLRRFIIFLFILLLCLIFLLVLLDYQGMLPVCPLLPGTSTTSTGPCKTCTNPANGTSMFPSCCCTKPSDGNCTCIPIPSSWAFARFLWEWASVRFSWLSFLVPFVQWFVGLSPTVWLSVMWMMWYWGPSLYNILSPFLPLLPIFFCLWVYI

SEQ ID NO: 336 - protein, 1544 aa, synthetic construct
  REGION 1..1544: note = Recombinant Sequence
MFLILLISLPTAFAVIGDLNCPLDPKLKGSFNNRDTGSPSISTDTVDVTNGLGTYYVLDRVYLNTTLFLNGYYPTSGSTYRNMALKGTDLLSTLWFKPPFLSDFINGIFAKVKNTKVFKDGVMYSEFPAITIGSTFVNTSYSVVVQPRTINSTQDGVNKLQGLLEVSVCQYNMCEHPHTICHPNLGNHFKELWHLDTGVVSCLYKRNFTYDVNATYLYFHFYQEGGTFYAYFTDTGFVTKFLFNVYLGMALSHYYVMPLTCISRRDIGFTLEYWVTPLTPRQYLLAFNQDGIIFNAVDCMSDFMSEIKCKTQSIAPPTGVYELNGYTVQPIADVYRRKPDLPNCNIEAWLNDKSVPSPLNWERKTFSNCNFNMSSLMSFIQADSFTCNNIDAAKIYGMCFSSITIDKFAIPNRRKVDLQLGNLGYLQSSNYRIDTTATSCQLYYNLPAANVSVSRFNPSTWNKRFGFIEDSVFVPQPTGVFTNHSVVYAQHCFKAPKNFCPCSSCPGKNNGIGTCPAGTNSLTCDNLCTLDPITFKAPDTYKCPQTKSLVGIGEHCSGLAVKSDYCGNNSCTCQPQAFLGWSADSCLQGDKCNIFANFILHDVNNGLTCSTDLQKANTEIELGVCVNYDLYGISGQGIFVEVNATYYNSWQNLLYDSNGNLYGFRDYITNRTFMIHSCYSGRVSAAYHANSPEPALLFRNIKCNYVFNNSLTRQLQPINYSFDSYLGCVVNAYNSTAISVQTCDLTVGSGYCVDYSKNSGSGSAITTGYRFTNFEPFTVNSVNDSLEPVGGLYEIQIPSEFTIGNMEEFIQTSSPKVTIDCAAFVCGDYAACKLQLVEYGSFCDNINAILTEVNELLDTTQLQVANSLMNGVTLSTKLKDGVNFNVDDINFSPVLGCLGSECSKPSSASAIEDLLFDKVKLSDVGFVEAYNNCTGGAEIRDLICVQSYKGIKVLPPLLSENQISGYTLAATSASLFPPWTAPAGVPFYLNVQYRINGLGVTMDVLSQNQKLIANAFNNALHAIQQGFDPTNSALVKIQAVVNANSEALNNLLQQLSNRFGAISASLQEILSRLDPPEAEAQIDRLINGRLTALNAYVSQQLSDSTLVKFSAAQAMEKVNECVKSQSSRINFCGNGNHIISLVQNAPYGLYFIHFNYVPTKYVTAKVSPGLCIAGNRGIAPKSGYFVNVNNTWMYTGSGYYYPEPITENNVVVMSTCAVNYTKAPYVMLNTSIPNLPDFKEELGQWFKNQTSVAPDLSLDYINVTFLDLQVEMNRLQEAIKVLNHSYINLKDIGTYEYYVKWPGSGSGSGSGSGSGSGSMENTTSGFLGPLLVLQAGFFLLTRILTIPQSLDSWWTSLNFLGGAPTCPGQNSRSPTSNHSPTSCPPICPGYRWMCLRRFIIFLFILLLCLIFLLVLLDYQGMLPVCPLLPGTSTTSTGPCKTCTNPANGTSMFPSCCCTKPSDGNCTCIPIPSSWAFARFLWEWASVRFSWLSFLVPFVQWFVGLSPTVWLSVMWMMWYWGPSLYNILSPFLPLLPIFFCLWVYI

SEQ ID NO: 337 - protein, 1542 aa, synthetic construct
  REGION 1..1542: note = Recombinant Sequence
MLLIIFILPTTLAVIGDFNCTNFAINDKNTTVPRISEYVVDVSYGLGTYYILDRVYLNTTILFTGYFPKSGANFRDLSLKGTTYLSTLWYQKPFLSDFNNGIFSRVKNTKLYVNKTLYSEFSTIVIGSVFINNSYTIVVQPHNGVLEITACQYTMCEYPHTICKSKGSSRNESWHFDKSEPLCLFKKNFTYNVSTDFLYFHFYQERGTFYAYYADSGMPTTFLFSLYLGTLLSHYYVLPLTCNAISSNTDNETLQYWVTPLSKRQYLLKFDNRGVITNAVDCSSSFFSEIQCKTKSLLPNTGVYDLSGFTVKPVATVHRRIPDLPDCDIDKWLNNFNVPSPLNWERKIFSNCNFNLSTLLRLVHTDSFSCNNFDESKIYGSCFKSIVLDKFAIPNSRRSDLQLGSSGFLQSSNYKIDTTSSSCQLYYSLPAINVTINNYNPSSWNRRYGFNNFNLSSHSVVYSRYCFSVNNTFCPCAKPSFASSCKSHKPPSASCPIGTNYRSCESTTVLDHTDWCRCSCLPDPITAYDPRSCSQKKSLVGVGEHCAGFGVDEEKCGVLDGSYNVSCLCSTDAFLGWSYDTCVSNNRCNIFSNFILNGINSGTTCSNDLLQPNTEVYTDVCVDYDLYGITGQGIFKEVSAVYYNSWQNLLYDSNGNIIGFKDFVTNKTYNIFPCYAGRVSAAFHQNASSLALLYRNLKCSYVLNNISLATQPYFDSYLGCVFNADNLTDYSVSSCALRMGSGFCVDYNSPSFSSSGSKGSSISASYRFVTFEPFNVSFVNDSIESVGGLYEIKIPTNFTIVGQEEFIQTNSPKVTIDCSLFVCSNYAACHDLLSEYGTFCDNINSILDEVNGLLDTTQLHVADTLMQGVTLSSNLNTNLHFDVDNINFKSLVGCLGPHCGSPSASFFEDLLFDKVKLSDVGFVEAYNNCTGGSEIRDLLCVQSFNGIKVLPPILSESQISGYTTAATVAAMFPPWSAPAGIPFSLNVQYRINGLGVTMDVLNKNQKLIATAFNNALLSIQNGFSPTNSALAKIQSVVNSNAQALNSLLQQLFNKFGAISSSLQEILSRLDPPEAQVQIDRLINGRLTALNAYVSQQLSDISLVKFGAALAMEKVNECVKSQSPRINFCGNGNHILSLVQNAPYGLLFMHFSYKPISFKTVLVSPGLCISGDVGIAPKQGYFIKHNDHWMFTGSSYYYPEPISDKNVVFMNTCSVNFTKAPLVYLNHSVPKLSDFESELSHWFKNQTSIAPNLTLNLHTINATFLDLYYEMNLIQESIKSLNNSYINLKDIGTYEMYVKWPGSGSGSGSGSGSGSGSMENTTSGFLGPLLVLQAGFFLLTRILTIPQSLDSWWTSLNFLGGAPTCPGQNSRSPTSNHSPTSCPPICPGYRWMCLRRFIIFLFILLLCLIFLLVLLDYQGMLPVCPLLPGTSTTSTGPCKTCTNPANGTSMFPSCCCTKPSDGNCTCIPIPSSWAFARFLWEWASVRFSWLSFLVPFVQWFVGLSPTVWLSVMWMMWYWGPSLYNILSPFLPLLPIFFCLWVYI

SEQ ID NO: 338 - protein, 1362 aa, synthetic construct
  REGION 1..1362: note = Recombinant Sequence
MFVLLVAYALLHIAGCQTTNGMNTSHSVCNGCVGHSENVFAVESGGYIPSNFAFNNWFLLTNTSSVVDGVVRSFQPLLLNCLWSVSGSRLTTGFVYFNGTGRGACKGFYSNASSDVIRYNINFEENLRRGTILFKTSYGAVVFYCTNNTLVSGDAHIPSGTVLGNFYCFVNTTIGNETTSAFVGALPKTVREFVISRTGHFYINGYRYFSLGNVEAVNFNVTNAATTVCTVALASYADVLVNVSQTAIANIIYCNSVINRLRCDQLSFDVPDGFYSTSPIQSVELPVSIVSLPVYHKHTFIVLYVNFELRRGPGRCYNCRPAVVNITLANFNETKGPLCVDTSHFTTQFFGVKFDRWSASINTGNCPFSFGKVNNFVKFGSVCFSLKDIPGGCAMPIMANLANLNSHNIGSLYVSWSDGDVITGVPKPVEGVSSFMNVTLNKCTKYNIYDVSGVGVIRISNDTFLNGITYTSTSGNLLGFKDVTNGTIYSITPCNPPDQLVVYQQAVVGAMLSENFTSYGFSNVVEMPKFFYASNGTYNCTDAVLTYSSFGVCADGSIIAVQPGNVSYDSVSAIVTANLSIPSNWTTSVQVEYLQITSTPIVVDCSTYVCNGNVRCVELLKQYTSACKTIEDALRNSAMLESADVSEMLTFDKKAFTLANVSSFGDYNLSSVIPSLPRSGSGVPGSSAIEDILFSKLVTSGLGTVDADYKKCTKGLSIADLACAQYYNGIMVLPGVADAERMAMYTGSLIGGIALGGLTSPASIPFSLAIQSRLNYVALQTDVLQENQKILAASFNKAMTNIVDAFTGVNDPITQTSQALQTVATALNKIQDVVNQQGNSLNHLTSQLRQNFQAISSSIQAIYDRLDPPQADQQVDRLITGRLAALNVFVSHTLTKYTEVRASRQLAQQKVNECVKSQSKRYGFCGNGTHIFSLVNAAPEGLVFLHTVLLPTQYKDVEAWSGLCVDGRNGYVLRQPNLALYKEGNYYRITSRIMFEPRIPTIADFVQIENCNVTFVNISRSELQTIVPEYIDVNKTLQELSYKLPNYTVPDLVVEQYNQTILNLTSEISTLENKSAELNYTVQKLQTLIDNINSTLVDLKWLNRVETYIKWPGSGSGSGSGSGSGSGSGSGSGSGSMENTTSGFLGPLLVLQAGFFLLTRILTIPQSLDSWWTSLNFLGGAPTCPGQNSRSPTSNHSPTSCPPICPGYRWMCLRRFIIFLFILLLCLIFLLVLLDYQGMLPVCPLLPGTSTTSTGPCKTCTNPANGTSMFPSCCCTKPSDGNCTCIPIPSSWAFARFLWEWASVRFSWLSFLVPFVQWFVGLSPTVWLSVMWMMWYWGPSLYNILSPFLPLLPIFFCLWVYI

SEQ ID NO: 339 - protein, 1546 aa, synthetic construct
  REGION 1..1546: note = Recombinant Sequence
MKLFLILLVLPLASCFFTCNSNANLSMLQLGVPDNSSTIVTGLLPTHWFCANQSTSVYSANGFFYIDVGNHRSAFALHTGYYDVNQYYIYVTNEIGLNASVTLKICKFGINTTFDFLSNSSSSFDCIVNLLFTEQLGAPLGITISGETVRLHLYNVTRTFYVPAAYKLTKLSVKCYFNYSCVFSVVNATVTVNVTTHNGRVVNYTVCDDCNGYTDNIFSVQQDGRIPNGFPFNNWFLLTNGSTLVDGVSRLYQPLRLTCLWPVPGLKSSTGFVYFNATGSDVNCNGYQHNSVADVMRYNLNFSANSVDNLKSGVIVFKTLQYDVLFYCSNSSSGVLDTTIPFGPSSQPYYCFINSTINTTHVSTFVGILPPTVREIVVARTGQFYINGFKYFDLGFIEAVNFNVTTASATDFWTVAFATFVDVLVNVSATKIQNLLYCDSPFEKLQCEHLQFGLQDGFYSANFLDDNVLPETYVALPIYYQHTDINFTATASFGGSCYVCKPHQVNISLNGNTSVCVRTSHFSIRYIYNRVKSGSPGDSSWHIYLKSGTCPFSFSKLNNFQKFKTICFSTVEVPGSCNFPLEATWHYTSYTIVGALYVTWSEGNSITGVPYPVSGIREFSNLVLNNCTKYNIYDYVGTGIIRSSNQSLAGGITYVSNSGNLLGFKNVSTGNIFIVTPCNQPDQVAVYQQSIIGAMTAVNESRYGLQNLLQLPNFYYVSNGGNNCTTAVMTYSNFGICADGSLIPVGPGNSSDNGISAIITANLSIPSNWTTSVQVEYLQITSTPIVVDCATYVCNGNPRCKNLLKQYTSACKTIEDALRLSAHLETNDVSSMLTFDSNAFSLANVTSFGDYNLSSVLPQRNIGSSGIAGSSPLEDLLFSKVVTSGLGTVDVDYKSCTKGLSIADLACAQYYNGIMVLPGVADAERMAMYTGSLIGGMVLGGLTSAPAIPFSLALQARLNYVALQTDVLQENQKILAASFNKAINNIVASFSSVNDPITQTAEAIHTVTIALNKIQDVVNQQGSALNHLTSQLRHNFQAISNSIQAIYDRLDPPQADQQVDRLITGRLAALNAFVSQVLNKYTEVRSSRRLAQQKVNECVKSQSNRYGFCGNGTHIFSIVNSAPDGLLFLHTVLLPTDYKNVKAWSGICVDGIYGYVLRQPNLVLYSDNGVFRVTSRIMFQPRLPVLSDFVQIYNCNVTFVNISRVELHTVIPDYVDVNKTLQEFAQNLPKYVKPNFDLTPFNLTYLNLSSELKQLEAKTASLFQTTVELQGLIDQINSTYVDLKLLNRFENYIKWPGSGSGSGSGSGSGSGSGSGSGSGSMENTTSGFLGPLLVLQAGFFLLTRILTIPQSLDSWWTSLNFLGGAPTCPGQNSRSPTSNHSPTSCPPICPGYRWMCLRRFIIFLFILLLCLIFLLVLLDYQGMLPVCPLLPGTSTTSTGPCKTCTNPANGTSMFPSCCCTKPSDGNCTCIPIPSSWAFARFLWEWASVRFSWLSFLVPFVQWFVGLSPTVWLSVMWMMWYWGPSLYNILSPFLPLLPIFFCLWVYI

SEQ ID NO: 340 - protein, 1552 aa, synthetic construct
  REGION 1..1552: note = Recombinant Sequence
MFLILLISLPTAFAVIGDLNCPLDPKLKGSFNNRDTGSPSISTDTVDVTNGLGTYYVLDRVYLNTTLFLNGYYPTSGSTYRNMALKGTDLLSTLWFKPPFLSDFINGIFAKVKNTKVFKDGVMYSEFPAITIGSTFVNTSYSVVVQPRTINSTQDGVNKLQGLLEVSVCQYNMCEHPHTICHPNLGNHFKELWHLDTGVVSCLYKRNFTYDVNATYLYFHFYQEGGTFYAYFTDTGFVTKFLFNVYLGMALSHYYVMPLTCISRRDIGFTLEYWVTPLTPRQYLLAFNQDGIIFNAVDCMSDFMSEIKCKTQSIAPPTGVYELNGYTVQPIADVYRRKPDLPNCNIEAWLNDKSVPSPLNWERKTFSNCNFNMSSLMSFIQADSFTCNNIDAAKIYGMCFSSITIDKFAIPNRRKVDLQLGNLGYLQSSNYRIDTTATSCQLYYNLPAANVSVSRFNPSTWNKRFGFIEDSVFVPQPTGVFTNHSVVYAQHCFKAPKNFCPCSSCPGKNNGIGTCPAGTNSLTCDNLCTLDPITFKAPDTYKCPQTKSLVGIGEHCSGLAVKSDYCGNNSCTCQPQAFLGWSADSCLQGDKCNIFANFILHDVNNGLTCSTDLQKANTEIELGVCVNYDLYGISGQGIFVEVNATYYNSWQNLLYDSNGNLYGFRDYITNRTFMIHSCYSGRVSAAYHANSPEPALLFRNIKCNYVFNNSLTRQLQPINYSFDSYLGCVVNAYNSTAISVQTCDLTVGSGYCVDYSKNSGSGSAITTGYRFTNFEPFTVNSVNDSLEPVGGLYEIQIPSEFTIGNMEEFIQTSSPKVTIDCAAFVCGDYAACKLQLVEYGSFCDNINAILTEVNELLDTTQLQVANSLMNGVTLSTKLKDGVNFNVDDINFSPVLGCLGSECSKPSSASAIEDLLFDKVKLSDVGFVEAYNNCTGGAEIRDLICVQSYKGIKVLPPLLSENQISGYTLAATSASLFPPWTAPAGVPFYLNVQYRINGLGVTMDVLSQNQKLIANAFNNALHAIQQGFDPTNSALVKIQAVVNANSEALNNLLQQLSNRFGAISASLQEILSRLDPPEAEAQIDRLINGRLTALNAYVSQQLSDSTLVKFSAAQAMEKVNECVKSQSSRINFCGNGNHIISLVQNAPYGLYFIHFNYVPTKYVTAKVSPGLCIAGNRGIAPKSGYFVNVNNTWMYTGSGYYYPEPITENNVVVMSTCAVNYTKAPYVMLNTSIPNLPDFKEELGQWFKNQTSVAPDLSLDYINVTFLDLQVEMNRLQEAIKVLNHSYINLKDIGTYEYYVKWPGSGSGSGSGSGSGSGSGSGSGSGSMENTTSGFLGPLLVLQAGFFLLTRILTIPQSLDSWWTSLNFLGGAPTCPGQNSRSPTSNHSPTSCPPICPGYRWMCLRRFIIFLFILLLCLIFLLVLLDYQGMLPVCPLLPGTSTTSTGPCKTCTNPANGTSMFPSCCCTKPSDGNCTCIPIPSSWAFARFLWEWASVRFSWLSFLVPFVQWFVGLSPTVWLSVMWMMWYWGPSLYNILSPFLPLLPIFFCLWVYI

SEQ ID NO: 341 - protein, 1550 aa, synthetic construct
  REGION 1..1550: note = Recombinant Sequence
MLLIIFILPTTLAVIGDFNCTNFAINDKNTTVPRISEYVVDVSYGLGTYYILDRVYLNTTILFTGYFPKSGANFRDLSLKGTTYLSTLWYQKPFLSDFNNGIFSRVKNTKLYVNKTLYSEFSTIVIGSVFINNSYTIVVQPHNGVLEITACQYTMCEYPHTICKSKGSSRNESWHFDKSEPLCLFKKNFTYNVSTDFLYFHFYQERGTFYAYYADSGMPTTFLFSLYLGTLLSHYYVLPLTCNAISSNTDNETLQYWVTPLSKRQYLLKFDNRGVITNAVDCSSSFFSEIQCKTKSLLPNTGVYDLSGFTVKPVATVHRRIPDLPDCDIDKWLNNFNVPSPLNWERKIFSNCNFNLSTLLRLVHTDSFSCNNFDESKIYGSCFKSIVLDKFAIPNSRRSDLQLGSSGFLQSSNYKIDTTSSSCQLYYSLPAINVTINNYNPSSWNRRYGFNNFNLSSHSVVYSRYCFSVNNTFCPCAKPSFASSCKSHKPPSASCPIGTNYRSCESTTVLDHTDWCRCSCLPDPITAYDPRSCSQKKSLVGVGEHCAGFGVDEEKCGVLDGSYNVSCLCSTDAFLGWSYDTCVSNNRCNIFSNFILNGINSGTTCSNDLLQPNTEVYTDVCVDYDLYGITGQGIFKEVSAVYYNSWQNLLYDSNGNIIGFKDFVTNKTYNIFPCYAGRVSAAFHQNASSLALLYRNLKCSYVLNNISLATQPYFDSYLGCVFNADNLTDYSVSSCALRMGSGFCVDYNSPSFSSSGSKGSSISASYRFVTFEPFNVSFVNDSIESVGGLYEIKIPTNFTIVGQEEFIQTNSPKVTIDCSLFVCSNYAACHDLLSEYGTFCDNINSILDEVNGLLDTTQLHVADTLMQGVTLSSNLNTNLHFDVDNINFKSLVGCLGPHCGSPSASFFEDLLFDKVKLSDVGFVEAYNNCTGGSEIRDLLCVQSFNGIKVLPPILSESQISGYTTAATVAAMFPPWSAPAGIPFSLNVQYRINGLGVTMDVLNKNQKLIATAFNNALLSIQNGFSPTNSALAKIQSVVNSNAQALNSLLQQLFNKFGAISSSLQEILSRLDPPEAQVQIDRLINGRLTALNAYVSQQLSDISLVKFGAALAMEKVNECVKSQSPRINFCGNGNHILSLVQNAPYGLLFMHFSYKPISFKTVLVSPGLCISGDVGIAPKQGYFIKHNDHWMFTGSSYYYPEPISDKNVVFMNTCSVNFTKAPLVYLNHSVPKLSDFESELSHWFKNQTSIAPNLTLNLHTINATFLDLYYEMNLIQESIKSLNNSYINLKDIGTYEMYVKWPGSGSGSGSGSGSGSGSGSGSGSGSMENTTSGFLGPLLVLQAGFFLLTRILTIPQSLDSWWTSLNFLGGAPTCPGQNSRSPTSNHSPTSCPPICPGYRWMCLRRFIIFLFILLLCLIFLLVLLDYQGMLPVCPLLPGTSTTSTGPCKTCTNPANGTSMFPSCCCTKPSDGNCTCIPIPSSWAFARFLWEWASVRFSWLSFLVPFVQWFVGLSPTVWLSVMWMMWYWGPSLYNILSPFLPLLPIFFCLWVYI

SEQ ID NO: 342 - protein, 1370 aa, synthetic construct
  REGION 1..1370: note = Recombinant Sequence
MFVLLVAYALLHIAGCQTTNGMNTSHSVCNGCVGHSENVFAVESGGYIPSNFAFNNWFLLTNTSSVVDGVVRSFQPLLLNCLWSVSGSRLTTGFVYFNGTGRGACKGFYSNASSDVIRYNINFEENLRRGTILFKTSYGAVVFYCTNNTLVSGDAHIPSGTVLGNFYCFVNTTIGNETTSAFVGALPKTVREFVISRTGHFYINGYRYFSLGNVEAVNFNVTNAATTVCTVALASYADVLVNVSQTAIANIIYCNSVINRLRCDQLSFDVPDGFYSTSPIQSVELPVSIVSLPVYHKHTFIVLYVNFELRRGPGRCYNCRPAVVNITLANFNETKGPLCVDTSHFTTQFFGVKFDRWSASINTGNCPFSFGKVNNFVKFGSVCFSLKDIPGGCAMPIMANLANLNSHNIGSLYVSWSDGDVITGVPKPVEGVSSFMNVTLNKCTKYNIYDVSGVGVIRISNDTFLNGITYTSTSGNLLGFKDVTNGTIYSITPCNPPDQLVVYQQAVVGAMLSENFTSYGFSNVVEMPKFFYASNGTYNCTDAVLTYSSFGVCADGSIIAVQPGNVSYDSVSAIVTANLSIPSNWTTSVQVEYLQITSTPIVVDCSTYVCNGNVRCVELLKQYTSACKTIEDALRNSAMLESADVSEMLTFDKKAFTLANVSSFGDYNLSSVIPSLPRSGSGVPGSSAIEDILFSKLVTSGLGTVDADYKKCTKGLSIADLACAQYYNGIMVLPGVADAERMAMYTGSLIGGIALGGLTSPASIPFSLAIQSRLNYVALQTDVLQENQKILAASFNKAMTNIVDAFTGVNDPITQTSQALQTVATALNKIQDVVNQQGNSLNHLTSQLRQNFQAISSSIQAIYDRLDPPQADQQVDRLITGRLAALNVFVSHTLTKYTEVRASRQLAQQKVNECVKSQSKRYGFCGNGTHIFSLVNAAPEGLVFLHTVLLPTQYKDVEAWSGLCVDGRNGYVLRQPNLALYKEGNYYRITSRIMFEPRIPTIADFVQIENCNVTFVNISRSELQTIVPEYIDVNKTLQELSYKLPNYTVPDLVVEQYNQTILNLTSEISTLENKSAELNYTVQKLQTLIDNINSTLVDLKWLNRVETYIKWPGSGSGSGSGSGSGSGSGSGSGSGSGSGSGSGSMENTTSGFLGPLLVLQAGFFLLTRILTIPQSLDSWWTSLNFLGGAPTCPGQNSRSPTSNHSPTSCPPICPGYRWMCLRRFIIFLFILLLCLIFLLVLLDYQGMLPVCPLLPGTSTTSTGPCKTCTNPANGTSMFPSCCCTKPSDGNCTCIPIPSSWAFARFLWEWASVRFSWLSFLVPFVQWFVGLSPTVWLSVMWMMWYWGPSLYNILSPFLPLLPIFFCLWVYI

SEQ ID NO: 343 - protein, 1554 aa, synthetic construct
  REGION 1..1554: note = Recombinant Sequence
MKLFLILLVLPLASCFFTCNSNANLSMLQLGVPDNSSTIVTGLLPTHWFCANQSTSVYSANGFFYIDVGNHRSAFALHTGYYDVNQYYIYVTNEIGLNASVTLKICKFGINTTFDFLSNSSSSFDCIVNLLFTEQLGAPLGITISGETVRLHLYNVTRTFYVPAAYKLTKLSVKCYFNYSCVFSVVNATVTVNVTTHNGRVVNYTVCDDCNGYTDNIFSVQQDGRIPNGFPFNNWFLLTNGSTLVDGVSRLYQPLRLTCLWPVPGLKSSTGFVYFNATGSDVNCNGYQHNSVADVMRYNLNFSANSVDNLKSGVIVFKTLQYDVLFYCSNSSSGVLDTTIPFGPSSQPYYCFINSTINTTHVSTFVGILPPTVREIVVARTGQFYINGFKYFDLGFIEAVNFNVTTASATDFWTVAFATFVDVLVNVSATKIQNLLYCDSPFEKLQCEHLQFGLQDGFYSANFLDDNVLPETYVALPIYYQHTDINFTATASFGGSCYVCKPHQVNISLNGNTSVCVRTSHFSIRYIYNRVKSGSPGDSSWHIYLKSGTCPFSFSKLNNFQKFKTICFSTVEVPGSCNFPLEATWHYTSYTIVGALYVTWSEGNSITGVPYPVSGIREFSNLVLNNCTKYNIYDYVGTGIIRSSNQSLAGGITYVSNSGNLLGFKNVSTGNIFIVTPCNQPDQVAVYQQSIIGAMTAVNESRYGLQNLLQLPNFYYVSNGGNNCTTAVMTYSNFGICADGSLIPVGPGNSSDNGISAIITANLSIPSNWTTSVQVEYLQITSTPIVVDCATYVCNGNPRCKNLLKQYTSACKTIEDALRLSAHLETNDVSSMLTFDSNAFSLANVTSFGDYNLSSVLPQRNIGSSGIAGSSPLEDLLFSKVVTSGLGTVDVDYKSCTKGLSIADLACAQYYNGIMVLPGVADAERMAMYTGSLIGGMVLGGLTSAPAIPFSLALQARLNYVALQTDVLQENQKILAASFNKAINNIVASFSSVNDPITQTAEAIHTVTIALNKIQDVVNQQGSALNHLTSQLRHNFQAISNSIQAIYDRLDPPQADQQVDRLITGRLAALNAFVSQVLNKYTEVRSSRRLAQQKVNECVKSQSNRYGFCGNGTHIFSIVNSAPDGLLFLHTVLLPTDYKNVKAWSGICVDGIYGYVLRQPNLVLYSDNGVFRVTSRIMFQPRLPVLSDFVQIYNCNVTFVNISRVELHTVIPDYVDVNKTLQEFAQNLPKYVKPNFDLTPFNLTYLNLSSELKQLEAKTASLFQTTVELQGLIDQINSTYVDLKLLNRFENYIKWPGSGSGSGSGSGSGSGSGSGSGSGSGSGSGSGSMENTTSGFLGPLLVLQAGFFLLTRILTIPQSLDSWWTSLNFLGGAPTCPGQNSRSPTSNHSPTSCPPICPGYRWMCLRRFIIFLFILLLCLIFLLVLLDYQGMLPVCPLLPGTSTTSTGPCKTCTNPANGTSMFPSCCCTKPSDGNCTCIPIPSSWAFARFLWEWASVRFSWLSFLVPFVQWFVGLSPTVWLSVMWMMWYWGPSLYNILSPFLPLLPIFFCLWVYI

SEQ ID NO: 344 - protein, 1560 aa, synthetic construct
  REGION 1..1560: note = Recombinant Sequence
MFLILLISLPTAFAVIGDLNCPLDPKLKGSFNNRDTGSPSISTDTVDVTNGLGTYYVLDRVYLNTTLFLNGYYPTSGSTYRNMALKGTDLLSTLWFKPPFLSDFINGIFAKVKNTKVFKDGVMYSEFPAITIGSTFVNTSYSVVVQPRTINSTQDGVNKLQGLLEVSVCQYNMCEHPHTICHPNLGNHFKELWHLDTGVVSCLYKRNFTYDVNATYLYFHFYQEGGTFYAYFTDTGFVTKFLFNVYLGMALSHYYVMPLTCISRRDIGFTLEYWVTPLTPRQYLLAFNQDGIIFNAVDCMSDFMSEIKCKTQSIAPPTGVYELNGYTVQPIADVYRRKPDLPNCNIEAWLNDKSVPSPLNWERKTFSNCNFNMSSLMSFIQADSFTCNNIDAAKIYGMCFSSITIDKFAIPNRRKVDLQLGNLGYLQSSNYRIDTTATSCQLYYNLPAANVSVSRFNPSTWNKRFGFIEDSVFVPQPTGVFTNHSVVYAQHCFKAPKNFCPCSSCPGKNNGIGTCPAGTNSLTCDNLCTLDPITFKAPDTYKCPQTKSLVGIGEHCSGLAVKSDYCGNNSCTCQPQAFLGWSADSCLQGDKCNIFANFILHDVNNGLTCSTDLQKANTEIELGVCVNYDLYGISGQGIFVEVNATYYNSWQNLLYDSNGNLYGFRDYITNRTFMIHSCYSGRVSAAYHANSPEPALLFRNIKCNYVFNNSLTRQLQPINYSFDSYLGCVVNAYNSTAISVQTCDLTVGSGYCVDYSKNSGSGSAITTGYRFTNFEPFTVNSVNDSLEPVGGLYEIQIPSEFTIGNMEEFIQTSSPKVTIDCAAFVCGDYAACKLQLVEYGSFCDNINAILTEVNELLDTTQLQVANSLMNGVTLSTKLKDGVNFNVDDINFSPVLGCLGSECSKPSSASAIEDLLFDKVKLSDVGFVEAYNNCTGGAEIRDLICVQSYKGIKVLPPLLSENQISGYTLAATSASLFPPWTAPAGVPFYLNVQYRINGLGVTMDVLSQNQKLIANAFNNALHAIQQGFDPTNSALVKIQAVVNANSEALNNLLQQLSNRFGAISASLQEILSRLDPPEAEAQIDRLINGRLTALNAYVSQQLSDSTLVKFSAAQAMEKVNECVKSQSSRINFCGNGNHIISLVQNAPYGLYFIHFNYVPTKYVTAKVSPGLCIAGNRGIAPKSGYFVNVNNTWMYTGSGYYYPEPITENNVVVMSTCAVNYTKAPYVMLNTSIPNLPDFKEELGQWFKNQTSVAPDLSLDYINVTFLDLQVEMNRLQEAIKVLNHSYINLKDIGTYEYYVKWPGSGSGSGSGSGSGSGSGSGSGSGSGSGSGSGSMENTTSGFLGPLLVLQAGFFLLTRILTIPQSLDSWWTSLNFLGGAPTCPGQNSRSPTSNHSPTSCPPICPGYRWMCLRRFIIFLFILLLCLIFLLVLLDYQGMLPVCPLLPGTSTTSTGPCKTCTNPANGTSMFPSCCCTKPSDGNCTCIPIPSSWAFARFLWEWASVRFSWLSFLVPFVQWFVGLSPTVWLSVMWMMWYWGPSLYNILSPFLPLLPIFFCLWVYI

SEQ ID NO: 345 - protein, 1558 aa, synthetic construct
  REGION 1..1558: note = Recombinant Sequence
MLLIIFILPTTLAVIGDFNCTNFAINDKNTTVPRISEYVVDVSYGLGTYYILDRVYLNTTILFTGYFPKSGANFRDLSLKGTTYLSTLWYQKPFLSDFNNGIFSRVKNTKLYVNKTLYSEFSTIVIGSVFINNSYTIVVQPHNGVLEITACQYTMCEYPHTICKSKGSSRNESWHFDKSEPLCLFKKNFTYNVSTDFLYFHFYQERGTFYAYYADSGMPTTFLFSLYLGTLLSHYYVLPLTCNAISSNTDNETLQYWVTPLSKRQYLLKFDNRGVITNAVDCSSSFFSEIQCKTKSLLPNTGVYDLSGFTVKPVATVHRRIPDLPDCDIDKWLNNFNVPSPLNWERKIFSNCNFNLSTLLRLVHTDSFSCNNFDESKIYGSCFKSIVLDKFAIPNSRRSDLQLGSSGFLQSSNYKIDTTSSSCQLYYSLPAINVTINNYNPSSWNRRYGFNNFNLSSHSVVYSRYCFSVNNTFCPCAKPSFASSCKSHKPPSASCPIGTNYRSCESTTVLDHTDWCRCSCLPDPITAYDPRSCSQKKSLVGVGEHCAGFGVDEEKCGVLDGSYNVSCLCSTDAFLGWSYDTCVSNNRCNIFSNFILNGINSGTTCSNDLLQPNTEVYTDVCVDYDLYGITGQGIFKEVSAVYYNSWQNLLYDSNGNIIGFKDFVTNKTYNIFPCYAGRVSAAFHQNASSLALLYRNLKCSYVLNNISLATQPYFDSYLGCVFNADNLTDYSVSSCALRMGSGFCVDYNSPSFSSSGSKGSSISASYRFVTFEPFNVSFVNDSIESVGGLYEIKIPTNFTIVGQEEFIQTNSPKVTIDCSLFVCSNYAACHDLLSEYGTFCDNINSILDEVNGLLDTTQLHVADTLMQGVTLSSNLNTNLHFDVDNINFKSLVGCLGPHCGSPSASFFEDLLFDKVKLSDVGFVEAYNNCTGGSEIRDLLCVQSFNGIKVLPPILSESQISGYTTAATVAAMFPPWSAPAGIPFSLNVQYRINGLGVTMDVLNKNQKLIATAFNNALLSIQNGFSPTNSALAKIQSVVNSNAQALNSLLQQLFNKFGAISSSLQEILSRLDPPEAQVQIDRLINGRLTALNAYVSQQLSDISLVKFGAALAMEKVNECVKSQSPRINFCGNGNHILSLVQNAPYGLLFMHFSYKPISFKTVLVSPGLCISGDVGIAPKQGYFIKHNDHWMFTGSSYYYPEPISDKNVVFMNTCSVNFTKAPLVYLNHSVPKLSDFESELSHWFKNQTSIAPNLTLNLHTINATFLDLYYEMNLIQESIKSLNNSYINLKDIGTYEMYVKWPGSGSGSGSGSGSGSGSGSGSGSGSGSGSGSGSMENTTSGFLGPLLVLQAGFFLLTRILTIPQSLDSWWTSLNFLGGAPTCPGQNSRSPTSNHSPTSCPPICPGYRWMCLRRFIIFLFILLLCLIFLLVLLDYQGMLPVCPLLPGTSTTSTGPCKTCTNPANGTSMFPSCCCTKPSDGNCTCIPIPSSWAFARFLWEWASVRFSWLSFLVPFVQWFVGLSPTVWLSVMWMMWYWGPSLYNILSPFLPLLPIFFCLWVYI

SEQ ID NO: 346 - protein, 1409 aa, synthetic construct
  REGION 1..1409: note = Recombinant Sequence
MFVLLVAYALLHIAGCQTTNGMNTSHSVCNGCVGHSENVFAVESGGYIPSNFAFNNWFLLTNTSSVVDGVVRSFQPLLLNCLWSVSGSRLTTGFVYFNGTGRGACKGFYSNASSDVIRYNINFEENLRRGTILFKTSYGAVVFYCTNNTLVSGDAHIPSGTVLGNFYCFVNTTIGNETTSAFVGALPKTVREFVISRTGHFYINGYRYFSLGNVEAVNFNVTNAATTVCTVALASYADVLVNVSQTAIANIIYCNSVINRLRCDQLSFDVPDGFYSTSPIQSVELPVSIVSLPVYHKHTFIVLYVNFELRRGPGRCYNCRPAVVNITLANFNETKGPLCVDTSHFTTQFFGVKFDRWSASINTGNCPFSFGKVNNFVKFGSVCFSLKDIPGGCAMPIMANLANLNSHNIGSLYVSWSDGDVITGVPKPVEGVSSFMNVTLNKCTKYNIYDVSGVGVIRISNDTFLNGITYTSTSGNLLGFKDVTNGTIYSITPCNPPDQLVVYQQAVVGAMLSENFTSYGFSNVVEMPKFFYASNGTYNCTDAVLTYSSFGVCADGSIIAVQPGNVSYDSVSAIVTANLSIPSNWTTSVQVEYLQITSTPIVVDCSTYVCNGNVRCVELLKQYTSACKTIEDALRNSAMLESADVSEMLTFDKKAFTLANVSSFGDYNLSSVIPSLPRSGSGVPGSSAIEDILFSKLVTSGLGTVDADYKKCTKGLSIADLACAQYYNGIMVLPGVADAERMAMYTGSLIGGIALGGLTSPASIPFSLAIQSRLNYVALQTDVLQENQKILAASFNKAMTNIVDAFTGVNDPITQTSQALQTVATALNKIQDVVNQQGNSLNHLTSQLRQNFQAISSSIQAIYDRLDPPQADQQVDRLITGRLAALNVFVSHTLTKYTEVRASRQLAQQKVNECVKSQSKRYGFCGNGTHIFSLVNAAPEGLVFLHTVLLPTQYKDVEAWSGLCVDGRNGYVLRQPNLALYKEGNYYRITSRIMFEPRIPTIADFVQIENCNVTFVNISRSELQTIVPEYIDVNKTLQELSYKLPNYTVPDLVVEQYNQTILNLTSEISTLENKSAELNYTVQKLQTLIDNINSTLVDLKWLNRVETYIKWPGSGSGSGSGSGSGSGSMQWNSSTFHQALLDPRVRGLYFPAGGSSSGTVNPVPTTASPISSIFSRTGDPAPNMESTTSGFLGPLLALQAGFFLLTRILTIPQSLDSWWTSLNFLGGAPTCPGQNLQSPTSNHSPTSCPPICPGYRWMCLRRFIIFLFILLLCLIFLLVLLDYQGMLPVCPLLPGTSTTSTGPCKTCTIPAQGTSMFPSCCCTKPSDGNCTCIPIPSSWAFARFLWEWASVRFSWLSLLVPFVQWFVGLSPTVWLSVIWMMWYWGPSLYNILNPFLPLLPIFFCLWVYI

SEQ ID NO: 347 - protein, 1593 aa, synthetic construct
  REGION 1..1593: note = Recombinant Sequence
MKLFLILLVLPLASCFFTCNSNANLSMLQLGVPDNSSTIVTGLLPTHWFCANQSTSVYSANGFFYIDVGNHRSAFALHTGYYDVNQYYIYVTNEIGLNASVTLKICKFGINTTFDFLSNSSSSFDCIVNLLFTEQLGAPLGITISGETVRLHLYNVTRTFYVPAAYKLTKLSVKCYFNYSCVFSVVNATVTVNVTTHNGRVVNYTVCDDCNGYTDNIFSVQQDGRIPNGFPFNNWFLLTNGSTLVDGVSRLYQPLRLTCLWPVPGLKSSTGFVYFNATGSDVNCNGYQHNSVADVMRYNLNFSANSVDNLKSGVIVFKTLQYDVLFYCSNSSSGVLDTTIPFGPSSQPYYCFINSTINTTHVSTFVGILPPTVREIVVARTGQFYINGFKYFDLGFIEAVNFNVTTASATDFWTVAFATFVDVLVNVSATKIQNLLYCDSPFEKLQCEHLQFGLQDGFYSANFLDDNVLPETYVALPIYYQHTDINFTATASFGGSCYVCKPHQVNISLNGNTSVCVRTSHFSIRYIYNRVKSGSPGDSSWHIYLKSGTCPFSFSKLNNFQKFKTICFSTVEVPGSCNFPLEATWHYTSYTIVGALYVTWSEGNSITGVPYPVSGIREFSNLVLNNCTKYNIYDYVGTGIIRSSNQSLAGGITYVSNSGNLLGFKNVSTGNIFIVTPCNQPDQVAVYQQSIIGAMTAVNESRYGLQNLLQLPNFYYVSNGGNNCTTAVMTYSNFGICADGSLIPVGPGNSSDNGISAIITANLSIPSNWTTSVQVEYLQITSTPIVVDCATYVCNGNPRCKNLLKQYTSACKTIEDALRLSAHLETNDVSSMLTFDSNAFSLANVTSFGDYNLSSVLPQRNIGSSGIAGSSPLEDLLFSKVVTSGLGTVDVDYKSCTKGLSIADLACAQYYNGIMVLPGVADAERMAMYTGSLIGGMVLGGLTSAPAIPFSLALQARLNYVALQTDVLQENQKILAASFNKAINNIVASFSSVNDPITQTAEAIHTVTIALNKIQDVVNQQGSALNHLTSQLRHNFQAISNSIQAIYDRLDPPQADQQVDRLITGRLAALNAFVSQVLNKYTEVRSSRRLAQQKVNECVKSQSNRYGFCGNGTHIFSIVNSAPDGLLFLHTVLLPTDYKNVKAWSGICVDGIYGYVLRQPNLVLYSDNGVFRVTSRIMFQPRLPVLSDFVQIYNCNVTFVNISRVELHTVIPDYVDVNKTLQEFAQNLPKYVKPNFDLTPFNLTYLNLSSELKQLEAKTASLFQTTVELQGLIDQINSTYVDLKLLNRFENYIKWPGSGSGSGSGSGSGSGSMQWNSSTFHQALLDPRVRGLYFPAGGSSSGTVNPVPTTASPISSIFSRTGDPAPNMESTTSGFLGPLLALQAGFFLLTRILTIPQSLDSWWTSLNFLGGAPTCPGQNLQSPTSNHSPTSCPPICPGYRWMCLRRFIIFLFILLLCLIFLLVLLDYQGMLPVCPLLPGTSTTSTGPCKTCTIPAQGTSMFPSCCCTKPSDGNCTCIPIPSSWAFARFLWEWASVRFSWLSLLVPFVQWFVGLSPTVWLSVIWMMWYWGPSLYNILNPFLPLLPIFFCLWVYI

SEQ ID NO: 348 - protein, 1599 aa, synthetic construct
  REGION 1..1599: note = Recombinant Sequence
MFLILLISLPTAFAVIGDLNCPLDPKLKGSFNNRDTGSPSISTDTVDVTNGLGTYYVLDRVYLNTTLFLNGYYPTSGSTYRNMALKGTDLLSTLWFKPPFLSDFINGIFAKVKNTKVFKDGVMYSEFPAITIGSTFVNTSYSVVVQPRTINSTQDGVNKLQGLLEVSVCQYNMCEHPHTICHPNLGNHFKELWHLDTGVVSCLYKRNFTYDVNATYLYFHFYQEGGTFYAYFTDTGFVTKFLFNVYLGMALSHYYVMPLTCISRRDIGFTLEYWVTPLTPRQYLLAFNQDGIIFNAVDCMSDFMSEIKCKTQSIAPPTGVYELNGYTVQPIADVYRRKPDLPNCNIEAWLNDKSVPSPLNWERKTFSNCNFNMSSLMSFIQADSFTCNNIDAAKIYGMCFSSITIDKFAIPNRRKVDLQLGNLGYLQSSNYRIDTTATSCQLYYNLPAANVSVSRFNPSTWNKRFGFIEDSVFVPQPTGVFTNHSVVYAQHCFKAPKNFCPCSSCPGKNNGIGTCPAGTNSLTCDNLCTLDPITFKAPDTYKCPQTKSLVGIGEHCSGLAVKSDYCGNNSCTCQPQAFLGWSADSCLQGDKCNIFANFILHDVNNGLTCSTDLQKANTEIELGVCVNYDLYGISGQGIFVEVNATYYNSWQNLLYDSNGNLYGFRDYITNRTFMIHSCYSGRVSAAYHANSPEPALLFRNIKCNYVFNNSLTRQLQPINYSFDSYLGCVVNAYNSTAISVQTCDLTVGSGYCVDYSKNSGSGSAITTGYRFTNFEPFTVNSVNDSLEPVGGLYEIQIPSEFTIGNMEEFIQTSSPKVTIDCAAFVCGDYAACKLQLVEYGSFCDNINAILTEVNELLDTTQLQVANSLMNGVTLSTKLKDGVNFNVDDINFSPVLGCLGSECSKPSSASAIEDLLFDKVKLSDVGFVEAYNNCTGGAEIRDLICVQSYKGIKVLPPLLSENQISGYTLAATSASLFPPWTAPAGVPFYLNVQYRINGLGVTMDVLSQNQKLIANAFNNALHAIQQGFDPTNSALVKIQAVVNANSEALNNLLQQLSNRFGAISASLQEILSRLDPPEAEAQIDRLINGRLTALNAYVSQQLSDSTLVKFSAAQAMEKVNECVKSQSSRINFCGNGNHIISLVQNAPYGLYFIHFNYVPTKYVTAKVSPGLCIAGNRGIAPKSGYFVNVNNTWMYTGSGYYYPEPITENNVVVMSTCAVNYTKAPYVMLNTSIPNLPDFKEELGQWFKNQTSVAPDLSLDYINVTFLDLQVEMNRLQEAIKVLNHSYINLKDIGTYEYYVKWPGSGSGSGSGSGSGSGSMQWNSSTFHQALLDPRVRGLYFPAGGSSSGTVNPVPTTASPISSIFSRTGDPAPNMESTTSGFLGPLLALQAGFFLLTRILTIPQSLDSWWTSLNFLGGAPTCPGQNLQSPTSNHSPTSCPPICPGYRWMCLRRFIIFLFILLLCLIFLLVLLDYQGMLPVCPLLPGTSTTSTGPCKTCTIPAQGTSMFPSCCCTKPSDGNCTCIPIPSSWAFARFLWEWASVRFSWLSLLVPFVQWFVGLSPTVWLSVIWMMWYWGPSLYNILNPFLPLLPIFFCLWVYI

SEQ ID NO: 349 - protein, 1597 aa, synthetic construct
  REGION 1..1597: note = Recombinant Sequence
MLLIIFILPTTLAVIGDFNCTNFAINDKNTTVPRISEYVVDVSYGLGTYYILDRVYLNTTILFTGYFPKSGANFRDLSLKGTTYLSTLWYQKPFLSDFNNGIFSRVKNTKLYVNKTLYSEFSTIVIGSVFINNSYTIVVQPHNGVLEITACQYTMCEYPHTICKSKGSSRNESWHFDKSEPLCLFKKNFTYNVSTDFLYFHFYQERGTFYAYYADSGMPTTFLFSLYLGTLLSHYYVLPLTCNAISSNTDNETLQYWVTPLSKRQYLLKFDNRGVITNAVDCSSSFFSEIQCKTKSLLPNTGVYDLSGFTVKPVATVHRRIPDLPDCDIDKWLNNFNVPSPLNWERKIFSNCNFNLSTLLRLVHTDSFSCNNFDESKIYGSCFKSIVLDKFAIPNSRRSDLQLGSSGFLQSSNYKIDTTSSSCQLYYSLPAINVTINNYNPSSWNRRYGFNNFNLSSHSVVYSRYCFSVNNTFCPCAKPSFASSCKSHKPPSASCPIGTNYRSCESTTVLDHTDWCRCSCLPDPITAYDPRSCSQKKSLVGVGEHCAGFGVDEEKCGVLDGSYNVSCLCSTDAFLGWSYDTCVSNNRCNIFSNFILNGINSGTTCSNDLLQPNTEVYTDVCVDYDLYGITGQGIFKEVSAVYYNSWQNLLYDSNGNIIGFKDFVTNKTYNIFPCYAGRVSAAFHQNASSLALLYRNLKCSYVLNNISLATQPYFDSYLGCVFNADNLTDYSVSSCALRMGSGFCVDYNSPSFSSSGSKGSSISASYRFVTFEPFNVSFVNDSIESVGGLYEIKIPTNFTIVGQEEFIQTNSPKVTIDCSLFVCSNYAACHDLLSEYGTFCDNINSILDEVNGLLDTTQLHVADTLMQGVTLSSNLNTNLHFDVDNINFKSLVGCLGPHCGSPSASFFEDLLFDKVKLSDVGFVEAYNNCTGGSEIRDLLCVQSFNGIKVLPPILSESQISGYTTAATVAAMFPPWSAPAGIPFSLNVQYRINGLGVTMDVLNKNQKLIATAFNNALLSIQNGFSPTNSALAKIQSVVNSNAQALNSLLQQLFNKFGAISSSLQEILSRLDPPEAQVQIDRLINGRLTALNAYVSQQLSDISLVKFGAALAMEKVNECVKSQSPRINFCGNGNHILSLVQNAPYGLLFMHFSYKPISFKTVLVSPGLCISGDVGIAPKQGYFIKHNDHWMFTGSSYYYPEPISDKNVVFMNTCSVNFTKAPLVYLNHSVPKLSDFESELSHWFKNQTSIAPNLTLNLHTINATFLDLYYEMNLIQESIKSLNNSYINLKDIGTYEMYVKWPGSGSGSGSGSGSGSGSMQWNSSTFHQALLDPRVRGLYFPAGGSSSGTVNPVPTTASPISSIFSRTGDPAPNMESTTSGFLGPLLALQAGFFLLTRILTIPQSLDSWWTSLNFLGGAPTCPGQNLQSPTSNHSPTSCPPICPGYRWMCLRRFIIFLFILLLCLIFLLVLLDYQGMLPVCPLLPGTSTTSTGPCKTCTIPAQGTSMFPSCCCTKPSDGNCTCIPIPSSWAFARFLWEWASVRFSWLSLLVPFVQWFVGLSPTVWLSVIWMMWYWGPSLYNILNPFLPLLPIFFCLWVYI

SEQ ID NO: 350 - protein, 1417 aa, synthetic construct
  REGION 1..1417: note = Recombinant Sequence
MFVLLVAYALLHIAGCQTTNGMNTSHSVCNGCVGHSENVFAVESGGYIPSNFAFNNWFLLTNTSSVVDGVVRSFQPLLLNCLWSVSGSRLTTGFVYFNGTGRGACKGFYSNASSDVIRYNINFEENLRRGTILFKTSYGAVVFYCTNNTLVSGDAHIPSGTVLGNFYCFVNTTIGNETTSAFVGALPKTVREFVISRTGHFYINGYRYFSLGNVEAVNFNVTNAATTVCTVALASYADVLVNVSQTAIANIIYCNSVINRLRCDQLSFDVPDGFYSTSPIQSVELPVSIVSLPVYHKHTFIVLYVNFELRRGPGRCYNCRPAVVNITLANFNETKGPLCVDTSHFTTQFFGVKFDRWSASINTGNCPFSFGKVNNFVKFGSVCFSLKDIPGGCAMPIMANLANLNSHNIGSLYVSWSDGDVITGVPKPVEGVSSFMNVTLNKCTKYNIYDVSGVGVIRISNDTFLNGITYTSTSGNLLGFKDVTNGTIYSITPCNPPDQLVVYQQAVVGAMLSENFTSYGFSNVVEMPKFFYASNGTYNCTDAVLTYSSFGVCADGSIIAVQPGNVSYDSVSAIVTANLSIPSNWTTSVQVEYLQITSTPIVVDCSTYVCNGNVRCVELLKQYTSACKTIEDALRNSAMLESADVSEMLTFDKKAFTLANVSSFGDYNLSSVIPSLPRSGSGVPGSSAIEDILFSKLVTSGLGTVDADYKKCTKGLSIADLACAQYYNGIMVLPGVADAERMAMYTGSLIGGIALGGLTSPASIPFSLAIQSRLNYVALQTDVLQENQKILAASFNKAMTNIVDAFTGVNDPITQTSQALQTVATALNKIQDVVNQQGNSLNHLTSQLRQNFQAISSSIQAIYDRLDPPQADQQVDRLITGRLAALNVFVSHTLTKYTEVRASRQLAQQKVNECVKSQSKRYGFCGNGTHIFSLVNAAPEGLVFLHTVLLPTQYKDVEAWSGLCVDGRNGYVLRQPNLALYKEGNYYRITSRIMFEPRIPTIADFVQIENCNVTFVNISRSELQTIVPEYIDVNKTLQELSYKLPNYTVPDLVVEQYNQTILNLTSEISTLENKSAELNYTVQKLQTLIDNINSTLVDLKWLNRVETYIKWPGSGSGSGSGSGSGSGSGSGSGSGSMQWNSSTFHQALLDPRVRGLYFPAGGSSSGTVNPVPTTASPISSIFSRTGDPAPNMESTTSGFLGPLLALQAGFFLLTRILTIPQSLDSWWTSLNFLGGAPTCPGQNLQSPTSNHSPTSCPPICPGYRWMCLRRFIIFLFILLLCLIFLLVLLDYQGMLPVCPLLPGTSTTSTGPCKTCTIPAQGTSMFPSCCCTKPSDGNCTCIPIPSSWAFARFLWEWASVRFSWLSLLVPFVQWFVGLSPTVWLSVIWMMWYWGPSLYNILNPFLPLLPIFFCLWVYI

SEQ ID NO: 351 - protein, 1601 aa, synthetic construct
  REGION 1..1601: note = Recombinant Sequence
MKLFLILLVLPLASCFFTCNSNANLSMLQLGVPDNSSTIVTGLLPTHWFCANQSTSVYSANGFFYIDVGNHRSAFALHTGYYDVNQYYIYVTNEIGLNASVTLKICKFGINTTFDFLSNSSSSFDCIVNLLFTEQLGAPLGITISGETVRLHLYNVTRTFYVPAAYKLTKLSVKCYFNYSCVFSVVNATVTVNVTTHNGRVVNYTVCDDCNGYTDNIFSVQQDGRIPNGFPFNNWFLLTNGSTLVDGVSRLYQPLRLTCLWPVPGLKSSTGFVYFNATGSDVNCNGYQHNSVADVMRYNLNFSANSVDNLKSGVIVFKTLQYDVLFYCSNSSSGVLDTTIPFGPSSQPYYCFINSTINTTHVSTFVGILPPTVREIVVARTGQFYINGFKYFDLGFIEAVNFNVTTASATDFWTVAFATFVDVLVNVSATKIQNLLYCDSPFEKLQCEHLQFGLQDGFYSANFLDDNVLPETYVALPIYYQHTDINFTATASFGGSCYVCKPHQVNISLNGNTSVCVRTSHFSIRYIYNRVKSGSPGDSSWHIYLKSGTCPFSFSKLNNFQKFKTICFSTVEVPGSCNFPLEATWHYTSYTIVGALYVTWSEGNSITGVPYPVSGIREFSNLVLNNCTKYNIYDYVGTGIIRSSNQSLAGGITYVSNSGNLLGFKNVSTGNIFIVTPCNQPDQVAVYQQSIIGAMTAVNESRYGLQNLLQLPNFYYVSNGGNNCTTAVMTYSNFGICADGSLIPVGPGNSSDNGISAIITANLSIPSNWTTSVQVEYLQITSTPIVVDCATYVCNGNPRCKNLLKQYTSACKTIEDALRLSAHLETNDVSSMLTFDSNAFSLANVTSFGDYNLSSVLPQRNIGSSGIAGSSPLEDLLFSKVVTSGLGTVDVDYKSCTKGLSIADLACAQYYNGIMVLPGVADAERMAMYTGSLIGGMVLGGLTSAPAIPFSLALQARLNYVALQTDVLQENQKILAASFNKAINNIVASFSSVNDPITQTAEAIHTVTIALNKIQDVVNQQGSALNHLTSQLRHNFQAISNSIQAIYDRLDPPQADQQVDRLITGRLAALNAFVSQVLNKYTEVRSSRRLAQQKVNECVKSQSNRYGFCGNGTHIFSIVNSAPDGLLFLHTVLLPTDYKNVKAWSGICVDGIYGYVLRQPNLVLYSDNGVFRVTSRIMFQPRLPVLSDFVQIYNCNVTFVNISRVELHTVIPDYVDVNKTLQEFAQNLPKYVKPNFDLTPFNLTYLNLSSELKQLEAKTASLFQTTVELQGLIDQINSTYVDLKLLNRFENYIKWPGSGSGSGSGSGSGSGSGSGSGSGSMQWNSSTFHQALLDPRVRGLYFPAGGSSSGTVNPVPTTASPISSIFSRTGDPAPNMESTTSGFLGPLLALQAGFFLLTRILTIPQSLDSWWTSLNFLGGAPTCPGQNLQSPTSNHSPTSCPPICPGYRWMCLRRFIIFLFILLLCLIFLLVLLDYQGMLPVCPLLPGTSTTSTGPCKTCTIPAQGTSMFPSCCCTKPSDGNCTCIPIPSSWAFARFLWEWASVRFSWLSLLVPFVQWFVGLSPTVWLSVIWMMWYWGPSLYNILNPFLPLLPIFFCLWVYI

SEQ ID NO: 352 - protein, 1607 aa, synthetic construct
  REGION 1..1607: note = Recombinant Sequence
MFLILLISLPTAFAVIGDLNCPLDPKLKGSFNNRDTGSPSISTDTVDVTNGLGTYYVLDRVYLNTTLFLNGYYPTSGSTYRNMALKGTDLLSTLWFKPPFLSDFINGIFAKVKNTKVFKDGVMYSEFPAITIGSTFVNTSYSVVVQPRTINSTQDGVNKLQGLLEVSVCQYNMCEHPHTICHPNLGNHFKELWHLDTGVVSCLYKRNFTYDVNATYLYFHFYQEGGTFYAYFTDTGFVTKFLFNVYLGMALSHYYVMPLTCISRRDIGFTLEYWVTPLTPRQYLLAFNQDGIIFNAVDCMSDFMSEIKCKTQSIAPPTGVYELNGYTVQPIADVYRRKPDLPNCNIEAWLNDKSVPSPLNWERKTFSNCNFNMSSLMSFIQADSFTCNNIDAAKIYGMCFSSITIDKFAIPNRRKVDLQLGNLGYLQSSNYRIDTTATSCQLYYNLPAANVSVSRFNPSTWNKRFGFIEDSVFVPQPTGVFTNHSVVYAQHCFKAPKNFCPCSSCPGKNNGIGTCPAGTNSLTCDNLCTLDPITFKAPDTYKCPQTKSLVGIGEHCSGLAVKSDYCGNNSCTCQPQAFLGWSADSCLQGDKCNIFANFILHDVNNGLTCSTDLQKANTEIELGVCVNYDLYGISGQGIFVEVNATYYNSWQNLLYDSNGNLYGFRDYITNRTFMIHSCYSGRVSAAYHANSPEPALLFRNIKCNYVFNNSLTRQLQPINYSFDSYLGCVVNAYNSTAISVQTCDLTVGSGYCVDYSKNSGSGSAITTGYRFTNFEPFTVNSVNDSLEPVGGLYEIQIPSEFTIGNMEEFIQTSSPKVTIDCAAFVCGDYAACKLQLVEYGSFCDNINAILTEVNELLDTTQLQVANSLMNGVTLSTKLKDGVNFNVDDINFSPVLGCLGSECSKPSSASAIEDLLFDKVKLSDVGFVEAYNNCTGGAEIRDLICVQSYKGIKVLPPLLSENQISGYTLAATSASLFPPWTAPAGVPFYLNVQYRINGLGVTMDVLSQNQKLIANAFNNALHAIQQGFDPTNSALVKIQAVVNANSEALNNLLQQLSNRFGAISASLQEILSRLDPPEAEAQIDRLINGRLTALNAYVSQQLSDSTLVKFSAAQAMEKVNECVKSQSSRINFCGNGNHIISLVQNAPYGLYFIHFNYVPTKYVTAKVSPGLCIAGNRGIAPKSGYFVNVNNTWMYTGSGYYYPEPITENNVVVMSTCAVNYTKAPYVMLNTSIPNLPDFKEELGQWFKNQTSVAPDLSLDYINVTFLDLQVEMNRLQEAIKVLNHSYINLKDIGTYEYYVKWPGSGSGSGSGSGSGSGSGSGSGSGSMQWNSSTFHQALLDPRVRGLYFPAGGSSSGTVNPVPTTASPISSIFSRTGDPAPNMESTTSGFLGPLLALQAGFFLLTRILTIPQSLDSWWTSLNFLGGAPTCPGQNLQSPTSNHSPTSCPPICPGYRWMCLRRFIIFLFILLLCLIFLLVLLDYQGMLPVCPLLPGTSTTSTGPCKTCTIPAQGTSMFPSCCCTKPSDGNCTCIPIPSSWAFARFLWEWASVRFSWLSLLVPFVQWFVGLSPTVWLSVIWMMWYWGPSLYNILNPFLPLLPIFFCLWVYI

SEQ ID NO: 353 - protein, 1605 aa, synthetic construct
  REGION 1..1605: note = Recombinant Sequence
MLLIIFILPTTLAVIGDFNCTNFAINDKNTTVPRISEYVVDVSYGLGTYYILDRVYLNTTILFTGYFPKSGANFRDLSLKGTTYLSTLWYQKPFLSDFNNGIFSRVKNTKLYVNKTLYSEFSTIVIGSVFINNSYTIVVQPHNGVLEITACQYTMCEYPHTICKSKGSSRNESWHFDKSEPLCLFKKNFTYNVSTDFLYFHFYQERGTFYAYYADSGMPTTFLFSLYLGTLLSHYYVLPLTCNAISSNTDNETLQYWVTPLSKRQYLLKFDNRGVITNAVDCSSSFFSEIQCKTKSLLPNTGVYDLSGFTVKPVATVHRRIPDLPDCDIDKWLNNFNVPSPLNWERKIFSNCNFNLSTLLRLVHTDSFSCNNFDESKIYGSCFKSIVLDKFAIPNSRRSDLQLGSSGFLQSSNYKIDTTSSSCQLYYSLPAINVTINNYNPSSWNRRYGFNNFNLSSHSVVYSRYCFSVNNTFCPCAKPSFASSCKSHKPPSASCPIGTNYRSCESTTVLDHTDWCRCSCLPDPITAYDPRSCSQKKSLVGVGEHCAGFGVDEEKCGVLDGSYNVSCLCSTDAFLGWSYDTCVSNNRCNIFSNFILNGINSGTTCSNDLLQPNTEVYTDVCVDYDLYGITGQGIFKEVSAVYYNSWQNLLYDSNGNIIGFKDFVTNKTYNIFPCYAGRVSAAFHQNASSLALLYRNLKCSYVLNNISLATQPYFDSYLGCVFNADNLTDYSVSSCALRMGSGFCVDYNSPSFSSSGSKGSSISASYRFVTFEPFNVSFVNDSIESVGGLYEIKIPTNFTIVGQEEFIQTNSPKVTIDCSLFVCSNYAACHDLLSEYGTFCDNINSILDEVNGLLDTTQLHVADTLMQGVTLSSNLNTNLHFDVDNINFKSLVGCLGPHCGSPSASFFEDLLFDKVKLSDVGFVEAYNNCTGGSEIRDLLCVQSFNGIKVLPPILSESQISGYTTAATVAAMFPPWSAPAGIPFSLNVQYRINGLGVTMDVLNKNQKLIATAFNNALLSIQNGFSPTNSALAKIQSVVNSNAQALNSLLQQLFNKFGAISSSLQEILSRLDPPEAQVQIDRLINGRLTALNAYVSQQLSDISLVKFGAALAMEKVNECVKSQSPRINFCGNGNHILSLVQNAPYGLLFMHFSYKPISFKTVLVSPGLCISGDVGIAPKQGYFIKHNDHWMFTGSSYYYPEPISDKNVVFMNTCSVNFTKAPLVYLNHSVPKLSDFESELSHWFKNQTSIAPNLTLNLHTINATFLDLYYEMNLIQESIKSLNNSYINLKDIGTYEMYVKWPGSGSGSGSGSGSGSGSGSGSGSGSMQWNSSTFHQALLDPRVRGLYFPAGGSSSGTVNPVPTTASPISSIFSRTGDPAPNMESTTSGFLGPLLALQAGFFLLTRILTIPQSLDSWWTSLNFLGGAPTCPGQNLQSPTSNHSPTSCPPICPGYRWMCLRRFIIFLFILLLCLIFLLVLLDYQGMLPVCPLLPGTSTTSTGPCKTCTIPAQGTSMFPSCCCTKPSDGNCTCIPIPSSWAFARFLWEWASVRFSWLSLLVPFVQWFVGLSPTVWLSVIWMMWYWGPSLYNILNPFLPLLPIFFCLWVYI

SEQ ID NO: 354 - protein, 1425 aa, synthetic construct
  REGION 1..1425: note = Recombinant Sequence
MFVLLVAYALLHIAGCQTTNGMNTSHSVCNGCVGHSENVFAVESGGYIPSNFAFNNWFLLTNTSSVVDGVVRSFQPLLLNCLWSVSGSRLTTGFVYFNGTGRGACKGFYSNASSDVIRYNINFEENLRRGTILFKTSYGAVVFYCTNNTLVSGDAHIPSGTVLGNFYCFVNTTIGNETTSAFVGALPKTVREFVISRTGHFYINGYRYFSLGNVEAVNFNVTNAATTVCTVALASYADVLVNVSQTAIANIIYCNSVINRLRCDQLSFDVPDGFYSTSPIQSVELPVSIVSLPVYHKHTFIVLYVNFELRRGPGRCYNCRPAVVNITLANFNETKGPLCVDTSHFTTQFFGVKFDRWSASINTGNCPFSFGKVNNFVKFGSVCFSLKDIPGGCAMPIMANLANLNSHNIGSLYVSWSDGDVITGVPKPVEGVSSFMNVTLNKCTKYNIYDVSGVGVIRISNDTFLNGITYTSTSGNLLGFKDVTNGTIYSITPCNPPDQLVVYQQAVVGAMLSENFTSYGFSNVVEMPKFFYASNGTYNCTDAVLTYSSFGVCADGSIIAVQPGNVSYDSVSAIVTANLSIPSNWTTSVQVEYLQITSTPIVVDCSTYVCNGNVRCVELLKQYTSACKTIEDALRNSAMLESADVSEMLTFDKKAFTLANVSSFGDYNLSSVIPSLPRSGSGVPGSSAIEDILFSKLVTSGLGTVDADYKKCTKGLSIADLACAQYYNGIMVLPGVADAERMAMYTGSLIGGIALGGLTSPASIPFSLAIQSRLNYVALQTDVLQENQKILAASFNKAMTNIVDAFTGVNDPITQTSQALQTVATALNKIQDVVNQQGNSLNHLTSQLRQNFQAISSSIQAIYDRLDPPQADQQVDRLITGRLAALNVFVSHTLTKYTEVRASRQLAQQKVNECVKSQSKRYGFCGNGTHIFSLVNAAPEGLVFLHTVLLPTQYKDVEAWSGLCVDGRNGYVLRQPNLALYKEGNYYRITSRIMFEPRIPTIADFVQIENCNVTFVNISRSELQTIVPEYIDVNKTLQELSYKLPNYTVPDLVVEQYNQTILNLTSEISTLENKSAELNYTVQKLQTLIDNINSTLVDLKWLNRVETYIKWPGSGSGSGSGSGSGSGSGSGSGSGSGSGSGSGSMQWNSSTFHQALLDPRVRGLYFPAGGSSSGTVNPVPTTASPISSIFSRTGDPAPNMESTTSGFLGPLLALQAGFFLLTRILTIPQSLDSWWTSLNFLGGAPTCPGQNLQSPTSNHSPTSCPPICPGYRWMCLRRFIIFLFILLLCLIFLLVLLDYQGMLPVCPLLPGTSTTSTGPCKTCTIPAQGTSMFPSCCCTKPSDGNCTCIPIPSSWAFARFLWEWASVRFSWLSLLVPFVQWFVGLSPTVWLSVIWMMWYWGPSLYNILNPFLPLLPIFFCLWVYI

SEQ ID NO: 355 - protein, 1609 aa, synthetic construct
  REGION 1..1609: note = Recombinant Sequence
MKLFLILLVLPLASCFFTCNSNANLSMLQLGVPDNSSTIVTGLLPTHWFCANQSTSVYSANGFFYIDVGNHRSAFALHTGYYDVNQYYIYVTNEIGLNASVTLKICKFGINTTFDFLSNSSSSFDCIVNLLFTEQLGAPLGITISGETVRLHLYNVTRTFYVPAAYKLTKLSVKCYFNYSCVFSVVNATVTVNVTTHNGRVVNYTVCDDCNGYTDNIFSVQQDGRIPNGFPFNNWFLLTNGSTLVDGVSRLYQPLRLTCLWPVPGLKSSTGFVYFNATGSDVNCNGYQHNSVADVMRYNLNFSANSVDNLKSGVIVFKTLQYDVLFYCSNSSSGVLDTTIPFGPSSQPYYCFINSTINTTHVSTFVGILPPTVREIVVARTGQFYINGFKYFDLGFIEAVNFNVTTASATDFWTVAFATFVDVLVNVSATKIQNLLYCDSPFEKLQCEHLQFGLQDGFYSANFLDDNVLPETYVALPIYYQHTDINFTATASFGGSCYVCKPHQVNISLNGNTSVCVRTSHFSIRYIYNRVKSGSPGDSSWHIYLKSGTCPFSFSKLNNFQKFKTICFSTVEVPGSCNFPLEATWHYTSYTIVGALYVTWSEGNSITGVPYPVSGIREFSNLVLNNCTKYNIYDYVGTGIIRSSNQSLAGGITYVSNSGNLLGFKNVSTGNIFIVTPCNQPDQVAVYQQSIIGAMTAVNESRYGLQNLLQLPNFYYVSNGGNNCTTAVMTYSNFGICADGSLIPVGPGNSSDNGISAIITANLSIPSNWTTSVQVEYLQITSTPIVVDCATYVCNGNPRCKNLLKQYTSACKTIEDALRLSAHLETNDVSSMLTFDSNAFSLANVTSFGDYNLSSVLPQRNIGSSGIAGSSPLEDLLFSKVVTSGLGTVDVDYKSCTKGLSIADLACAQYYNGIMVLPGVADAERMAMYTGSLIGGMVLGGLTSAPAIPFSLALQARLNYVALQTDVLQENQKILAASFNKAINNIVASFSSVNDPITQTAEAIHTVTIALNKIQDVVNQQGSALNHLTSQLRHNFQAISNSIQAIYDRLDPPQADQQVDRLITGRLAALNAFVSQVLNKYTEVRSSRRLAQQKVNECVKSQSNRYGFCGNGTHIFSIVNSAPDGLLFLHTVLLPTDYKNVKAWSGICVDGIYGYVLRQPNLVLYSDNGVFRVTSRIMFQPRLPVLSDFVQIYNCNVTFVNISRVELHTVIPDYVDVNKTLQEFAQNLPKYVKPNFDLTPFNLTYLNLSSELKQLEAKTASLFQTTVELQGLIDQINSTYVDLKLLNRFENYIKWPGSGSGSGSGSGSGSGSGSGSGSGSGSGSGSGSMQWNSSTFHQALLDPRVRGLYFPAGGSSSGTVNPVPTTASPISSIFSRTGDPAPNMESTTSGFLGPLLALQAGFFLLTRILTIPQSLDSWWTSLNFLGGAPTCPGQNLQSPTSNHSPTSCPPICPGYRWMCLRRFIIFLFILLLCLIFLLVLLDYQGMLPVCPLLPGTSTTSTGPCKTCTIPAQGTSMFPSCCCTKPSDGNCTCIPIPSSWAFARFLWEWASVRFSWLSLLVPFVQWFVGLSPTVWLSVIWMMWYWGPSLYNILNPFLPLLPIFFCLWVYI

SEQ ID NO: 356 - protein, 1615 aa, synthetic construct
  REGION 1..1615: note = Recombinant Sequence
MFLILLISLPTAFAVIGDLNCPLDPKLKGSFNNRDTGSPSISTDTVDVTNGLGTYYVLDRVYLNTTLFLNGYYPTSGSTYRNMALKGTDLLSTLWFKPPFLSDFINGIFAKVKNTKVFKDGVMYSEFPAITIGSTFVNTSYSVVVQPRTINSTQDGVNKLQGLLEVSVCQYNMCEHPHTICHPNLGNHFKELWHLDTGVVSCLYKRNFTYDVNATYLYFHFYQEGGTFYAYFTDTGFVTKFLFNVYLGMALSHYYVMPLTCISRRDIGFTLEYWVTPLTPRQYLLAFNQDGIIFNAVDCMSDFMSEIKCKTQSIAPPTGVYELNGYTVQPIADVYRRKPDLPNCNIEAWLNDKSVPSPLNWERKTFSNCNFNMSSLMSFIQADSFTCNNIDAAKIYGMCFSSITIDKFAIPNRRKVDLQLGNLGYLQSSNYRIDTTATSCQLYYNLPAANVSVSRFNPSTWNKRFGFIEDSVFVPQPTGVFTNHSVVYAQHCFKAPKNFCPCSSCPGKNNGIGTCPAGTNSLTCDNLCTLDPITFKAPDTYKCPQTKSLVGIGEHCSGLAVKSDYCGNNSCTCQPQAFLGWSADSCLQGDKCNIFANFILHDVNNGLTCSTDLQKANTEIELGVCVNYDLYGISGQGIFVEVNATYYNSWQNLLYDSNGNLYGFRDYITNRTFMIHSCYSGRVSAAYHANSPEPALLFRNIKCNYVFNNSLTRQLQPINYSFDSYLGCVVNAYNSTAISVQTCDLTVGSGYCVDYSKNSGSGSAITTGYRFTNFEPFTVNSVNDSLEPVGGLYEIQIPSEFTIGNMEEFIQTSSPKVTIDCAAFVCGDYAACKLQLVEYGSFCDNINAILTEVNELLDTTQLQVANSLMNGVTLSTKLKDGVNFNVDDINFSPVLGCLGSECSKPSSASAIEDLLFDKVKLSDVGFVEAYNNCTGGAEIRDLICVQSYKGIKVLPPLLSENQISGYTLAATSASLFPPWTAPAGVPFYLNVQYRINGLGVTMDVLSQNQKLIANAFNNALHAIQQGFDPTNSALVKIQAVVNANSEALNNLLQQLSNRFGAISASLQEILSRLDPPEAEAQIDRLINGRLTALNAYVSQQLSDSTLVKFSAAQAMEKVNECVKSQSSRINFCGNGNHIISLVQNAPYGLYFIHFNYVPTKYVTAKVSPGLCIAGNRGIAPKSGYFVNVNNTWMYTGSGYYYPEPITENNVVVMSTCAVNYTKAPYVMLNTSIPNLPDFKEELGQWFKNQTSVAPDLSLDYINVTFLDLQVEMNRLQEAIKVLNHSYINLKDIGTYEYYVKWPGSGSGSGSGSGSGSGSGSGSGSGSGSGSGSGSMQWNSSTFHQALLDPRVRGLYFPAGGSSSGTVNPVPTTASPISSIFSRTGDPAPNMESTTSGFLGPLLALQAGFFLLTRILTIPQSLDSWWTSLNFLGGAPTCPGQNLQSPTSNHSPTSCPPICPGYRWMCLRRFIIFLFILLLCLIFLLVLLDYQGMLPVCPLLPGTSTTSTGPCKTCTIPAQGTSMFPSCCCTKPSDGNCTCIPIPSSWAFARFLWEWASVRFSWLSLLVPFVQWFVGLSPTVWLSVIWMMWYWGPSLYNILNPFLPLLPIFFCLWVYI

SEQ ID NO: 357 - protein, 1613 aa, synthetic construct
  REGION 1..1613: note = Recombinant Sequence
MLLIIFILPTTLAVIGDFNCTNFAINDKNTTVPRISEYVVDVSYGLGTYYILDRVYLNTTILFTGYFPKSGANFRDLSLKGTTYLSTLWYQKPFLSDFNNGIFSRVKNTKLYVNKTLYSEFSTIVIGSVFINNSYTIVVQPHNGVLEITACQYTMCEYPHTICKSKGSSRNESWHFDKSEPLCLFKKNFTYNVSTDFLYFHFYQERGTFYAYYADSGMPTTFLFSLYLGTLLSHYYVLPLTCNAISSNTDNETLQYWVTPLSKRQYLLKFDNRGVITNAVDCSSSFFSEIQCKTKSLLPNTGVYDLSGFTVKPVATVHRRIPDLPDCDIDKWLNNFNVPSPLNWERKIFSNCNFNLSTLLRLVHTDSFSCNNFDESKIYGSCFKSIVLDKFAIPNSRRSDLQLGSSGFLQSSNYKIDTTSSSCQLYYSLPAINVTINNYNPSSWNRRYGFNNFNLSSHSVVYSRYCFSVNNTFCPCAKPSFASSCKSHKPPSASCPIGTNYRSCESTTVLDHTDWCRCSCLPDPITAYDPRSCSQKKSLVGVGEHCAGFGVDEEKCGVLDGSYNVSCLCSTDAFLGWSYDTCVSNNRCNIFSNFILNGINSGTTCSNDLLQPNTEVYTDVCVDYDLYGITGQGIFKEVSAVYYNSWQNLLYDSNGNIIGFKDFVTNKTYNIFPCYAGRVSAAFHQNASSLALLYRNLKCSYVLNNISLATQPYFDSYLGCVFNADNLTDYSVSSCALRMGSGFCVDYNSPSFSSSGSKGSSISASYRFVTFEPFNVSFVNDSIESVGGLYEIKIPTNFTIVGQEEFIQTNSPKVTIDCSLFVCSNYAACHDLLSEYGTFCDNINSILDEVNGLLDTTQLHVADTLMQGVTLSSNLNTNLHFDVDNINFKSLVGCLGPHCGSPSASFFEDLLFDKVKLSDVGFVEAYNNCTGGSEIRDLLCVQSFNGIKVLPPILSESQISGYTTAATVAAMFPPWSAPAGIPFSLNVQYRINGLGVTMDVLNKNQKLIATAFNNALLSIQNGFSPTNSALAKIQSVVNSNAQALNSLLQQLFNKFGAISSSLQEILSRLDPPEAQVQIDRLINGRLTALNAYVSQQLSDISLVKFGAALAMEKVNECVKSQSPRINFCGNGNHILSLVQNAPYGLLFMHFSYKPISFKTVLVSPGLCISGDVGIAPKQGYFIKHNDHWMFTGSSYYYPEPISDKNVVFMNTCSVNFTKAPLVYLNHSVPKLSDFESELSHWFKNQTSIAPNLTLNLHTINATFLDLYYEMNLIQESIKSLNNSYINLKDIGTYEMYVKWPGSGSGSGSGSGSGSGSGSGSGSGSGSGSGSGSMQWNSSTFHQALLDPRVRGLYFPAGGSSSGTVNPVPTTASPISSIFSRTGDPAPNMESTTSGFLGPLLALQAGFFLLTRILTIPQSLDSWWTSLNFLGGAPTCPGQNLQSPTSNHSPTSCPPICPGYRWMCLRRFIIFLFILLLCLIFLLVLLDYQGMLPVCPLLPGTSTTSTGPCKTCTIPAQGTSMFPSCCCTKPSDGNCTCIPIPSSWAFARFLWEWASVRFSWLSLLVPFVQWFVGLSPTVWLSVIWMMWYWGPSLYNILNPFLPLLPIFFCLWVYI

SEQ ID NO: 358 - protein, 1528 aa, synthetic construct
  REGION 1..1528: note = Recombinant Sequence
MFVLLVAYALLHIAGCQTTNGMNTSHSVCNGCVGHSENVFAVESGGYIPSNFAFNNWFLLTNTSSVVDGVVRSFQPLLLNCLWSVSGSRLTTGFVYFNGTGRGACKGFYSNASSDVIRYNINFEENLRRGTILFKTSYGAVVFYCTNNTLVSGDAHIPSGTVLGNFYCFVNTTIGNETTSAFVGALPKTVREFVISRTGHFYINGYRYFSLGNVEAVNFNVTNAATTVCTVALASYADVLVNVSQTAIANIIYCNSVINRLRCDQLSFDVPDGFYSTSPIQSVELPVSIVSLPVYHKHTFIVLYVNFELRRGPGRCYNCRPAVVNITLANFNETKGPLCVDTSHFTTQFFGVKFDRWSASINTGNCPFSFGKVNNFVKFGSVCFSLKDIPGGCAMPIMANLANLNSHNIGSLYVSWSDGDVITGVPKPVEGVSSFMNVTLNKCTKYNIYDVSGVGVIRISNDTFLNGITYTSTSGNLLGFKDVTNGTIYSITPCNPPDQLVVYQQAVVGAMLSENFTSYGFSNVVEMPKFFYASNGTYNCTDAVLTYSSFGVCADGSIIAVQPGNVSYDSVSAIVTANLSIPSNWTTSVQVEYLQITSTPIVVDCSTYVCNGNVRCVELLKQYTSACKTIEDALRNSAMLESADVSEMLTFDKKAFTLANVSSFGDYNLSSVIPSLPRSGSGVPGSSAIEDILFSKLVTSGLGTVDADYKKCTKGLSIADLACAQYYNGIMVLPGVADAERMAMYTGSLIGGIALGGLTSPASIPFSLAIQSRLNYVALQTDVLQENQKILAASFNKAMTNIVDAFTGVNDPITQTSQALQTVATALNKIQDVVNQQGNSLNHLTSQLRQNFQAISSSIQAIYDRLDPPQADQQVDRLITGRLAALNVFVSHTLTKYTEVRASRQLAQQKVNECVKSQSKRYGFCGNGTHIFSLVNAAPEGLVFLHTVLLPTQYKDVEAWSGLCVDGRNGYVLRQPNLALYKEGNYYRITSRIMFEPRIPTIADFVQIENCNVTFVNISRSELQTIVPEYIDVNKTLQELSYKLPNYTVPDLVVEQYNQTILNLTSEISTLENKSAELNYTVQKLQTLIDNINSTLVDLKWLNRVETYIKWPGSGSGSGSGSGSGSGSMGGWSSKPRQGMGTNLSVPNPLGFFPDHQLDPAFGANSNNPDWDFNPNKDQWPEANQVGAGAFGPGFTPPHGGLLGWSPQAQGILTTVPAAPPPASTNRQSGRQPTPISPPLRDSHPQAMQWNSTTFHQALLDPRVRGLYFPAGGSSSGTVNPVPTTASPISSIFSRTGDPAPNMENTTSGFLGPLLVLQAGFFLLTRILTIPQSLDSWWTSLNFLGGAPTCPGQNSQSPTSNHSPTSCPPICPGYRWMCLRRFIIFLFILLLCLIFLLVLLDYQGMLPVCPLLPGTSTTSTGPCKTCTIPAQGTSMFPSCCCTKPSDGNCTCIPIPSSWAFARFLWEWASVRFSWLSLLVPFVQWFVGLSPTVWLSVIWMMWYWGPSLYNILSPFLPLLPIFFCLWVYI

SEQ ID NO: 359 - protein, 1712 aa, synthetic construct
  REGION 1..1712: note = Recombinant Sequence
MKLFLILLVLPLASCFFTCNSNANLSMLQLGVPDNSSTIVTGLLPTHWFCANQSTSVYSANGFFYIDVGNHRSAFALHTGYYDVNQYYIYVTNEIGLNASVTLKICKFGINTTFDFLSNSSSSFDCIVNLLFTEQLGAPLGITISGETVRLHLYNVTRTFYVPAAYKLTKLSVKCYFNYSCVFSVVNATVTVNVTTHNGRVVNYTVCDDCNGYTDNIFSVQQDGRIPNGFPFNNWFLLTNGSTLVDGVSRLYQPLRLTCLWPVPGLKSSTGFVYFNATGSDVNCNGYQHNSVADVMRYNLNFSANSVDNLKSGVIVFKTLQYDVLFYCSNSSSGVLDTTIPFGPSSQPYYCFINSTINTTHVSTFVGILPPTVREIVVARTGQFYINGFKYFDLGFIEAVNFNVTTASATDFWTVAFATFVDVLVNVSATKIQNLLYCDSPFEKLQCEHLQFGLQDGFYSANFLDDNVLPETYVALPIYYQHTDINFTATASFGGSCYVCKPHQVNISLNGNTSVCVRTSHFSIRYIYNRVKSGSPGDSSWHIYLKSGTCPFSFSKLNNFQKFKTICFSTVEVPGSCNFPLEATWHYTSYTIVGALYVTWSEGNSITGVPYPVSGIREFSNLVLNNCTKYNIYDYVGTGIIRSSNQSLAGGITYVSNSGNLLGFKNVSTGNIFIVTPCNQPDQVAVYQQSIIGAMTAVNESRYGLQNLLQLPNFYYVSNGGNNCTTAVMTYSNFGICADGSLIPVGPGNSSDNGISAIITANLSIPSNWTTSVQVEYLQITSTPIVVDCATYVCNGNPRCKNLLKQYTSACKTIEDALRLSAHLETNDVSSMLTFDSNAFSLANVTSFGDYNLSSVLPQRNIGSSGIAGSSPLEDLLFSKVVTSGLGTVDVDYKSCTKGLSIADLACAQYYNGIMVLPGVADAERMAMYTGSLIGGMVLGGLTSAPAIPFSLALQARLNYVALQTDVLQENQKILAASFNKAINNIVASFSSVNDPITQTAEAIHTVTIALNKIQDVVNQQGSALNHLTSQLRHNFQAISNSIQAIYDRLDPPQADQQVDRLITGRLAALNAFVSQVLNKYTEVRSSRRLAQQKVNECVKSQSNRYGFCGNGTHIFSIVNSAPDGLLFLHTVLLPTDYKNVKAWSGICVDGIYGYVLRQPNLVLYSDNGVFRVTSRIMFQPRLPVLSDFVQIYNCNVTFVNISRVELHTVIPDYVDVNKTLQEFAQNLPKYVKPNFDLTPFNLTYLNLSSELKQLEAKTASLFQTTVELQGLIDQINSTYVDLKLLNRFENYIKWPGSGSGSGSGSGSGSGSMGGWSSKPRQGMGTNLSVPNPLGFFPDHQLDPAFGANSNNPDWDFNPNKDQWPEANQVGAGAFGPGFTPPHGGLLGWSPQAQGILTTVPAAPPPASTNRQSGRQPTPISPPLRDSHPQAMQWNSTTFHQALLDPRVRGLYFPAGGSSSGTVNPVPTTASPISSIFSRTGDPAPNMENTTSGFLGPLLVLQAGFFLLTRILTIPQSLDSWWTSLNFLGGAPTCPGQNSQSPTSNHSPTSCPPICPGYRWMCLRRFIIFLFILLLCLIFLLVLLDYQGMLPVCPLLPGTSTTSTGPCKTCTIPAQGTSMFPSCCCTKPSDGNCTCIPIPSSWAFARFLWEWASVRFSWLSLLVPFVQWFVGLSPTVWLSVIWMMWYWGPSLYNILSPFLPLLPIFFCLWVYI

SEQ ID NO: 360 - protein, 1718 aa, synthetic construct
  REGION 1..1718: note = Recombinant Sequence
MFLILLISLPTAFAVIGDLNCPLDPKLKGSFNNRDTGSPSISTDTVDVTNGLGTYYVLDRVYLNTTLFLNGYYPTSGSTYRNMALKGTDLLSTLWFKPPFLSDFINGIFAKVKNTKVFKDGVMYSEFPAITIGSTFVNTSYSVVVQPRTINSTQDGVNKLQGLLEVSVCQYNMCEHPHTICHPNLGNHFKELWHLDTGVVSCLYKRNFTYDVNATYLYFHFYQEGGTFYAYFTDTGFVTKFLFNVYLGMALSHYYVMPLTCISRRDIGFTLEYWVTPLTPRQYLLAFNQDGIIFNAVDCMSDFMSEIKCKTQSIAPPTGVYELNGYTVQPIADVYRRKPDLPNCNIEAWLNDKSVPSPLNWERKTFSNCNFNMSSLMSFIQADSFTCNNIDAAKIYGMCFSSITIDKFAIPNRRKVDLQLGNLGYLQSSNYRIDTTATSCQLYYNLPAANVSVSRFNPSTWNKRFGFIEDSVFVPQPTGVFTNHSVVYAQHCFKAPKNFCPCSSCPGKNNGIGTCPAGTNSLTCDNLCTLDPITFKAPDTYKCPQTKSLVGIGEHCSGLAVKSDYCGNNSCTCQPQAFLGWSADSCLQGDKCNIFANFILHDVNNGLTCSTDLQKANTEIELGVCVNYDLYGISGQGIFVEVNATYYNSWQNLLYDSNGNLYGFRDYITNRTFMIHSCYSGRVSAAYHANSPEPALLFRNIKCNYVFNNSLTRQLQPINYSFDSYLGCVVNAYNSTAISVQTCDLTVGSGYCVDYSKNSGSGSAITTGYRFTNFEPFTVNSVNDSLEPVGGLYEIQIPSEFTIGNMEEFIQTSSPKVTIDCAAFVCGDYAACKLQLVEYGSFCDNINAILTEVNELLDTTQLQVANSLMNGVTLSTKLKDGVNFNVDDINFSPVLGCLGSECSKPSSASAIEDLLFDKVKLSDVGFVEAYNNCTGGAEIRDLICVQSYKGIKVLPPLLSENQISGYTLAATSASLFPPWTAPAGVPFYLNVQYRINGLGVTMDVLSQNQKLIANAFNNALHAIQQGFDPTNSALVKIQAVVNANSEALNNLLQQLSNRFGAISASLQEILSRLDPPEAEAQIDRLINGRLTALNAYVSQQLSDSTLVKFSAAQAMEKVNECVKSQSSRINFCGNGNHIISLVQNAPYGLYFIHFNYVPTKYVTAKVSPGLCIAGNRGIAPKSGYFVNVNNTWMYTGSGYYYPEPITENNVVVMSTCAVNYTKAPYVMLNTSIPNLPDFKEELGQWFKNQTSVAPDLSLDYINVTFLDLQVEMNRLQEAIKVLNHSYINLKDIGTYEYYVKWPGSGSGSGSGSGSGSGSMGGWSSKPRQGMGTNLSVPNPLGFFPDHQLDPAFGANSNNPDWDFNPNKDQWPEANQVGAGAFGPGFTPPHGGLLGWSPQAQGILTTVPAAPPPASTNRQSGRQPTPISPPLRDSHPQAMQWNSTTFHQALLDPRVRGLYFPAGGSSSGTVNPVPTTASPISSIFSRTGDPAPNMENTTSGFLGPLLVLQAGFFLLTRILTIPQSLDSWWTSLNFLGGAPTCPGQNSQSPTSNHSPTSCPPICPGYRWMCLRRFIIFLFILLLCLIFLLVLLDYQGMLPVCPLLPGTSTTSTGPCKTCTIPAQGTSMFPSCCCTKPSDGNCTCIPIPSSWAFARFLWEWASVRFSWLSLLVPFVQWFVGLSPTVWLSVIWMMWYWGPSLYNILSPFLPLLPIFFCLWVYI

SEQ ID NO: 361 - protein, 1716 aa, synthetic construct
  REGION 1..1716: note = Recombinant Sequence
MLLIIFILPTTLAVIGDFNCTNFAINDKNTTVPRISEYVVDVSYGLGTYYILDRVYLNTTILFTGYFPKSGANFRDLSLKGTTYLSTLWYQKPFLSDFNNGIFSRVKNTKLYVNKTLYSEFSTIVIGSVFINNSYTIVVQPHNGVLEITACQYTMCEYPHTICKSKGSSRNESWHFDKSEPLCLFKKNFTYNVSTDFLYFHFYQERGTFYAYYADSGMPTTFLFSLYLGTLLSHYYVLPLTCNAISSNTDNETLQYWVTPLSKRQYLLKFDNRGVITNAVDCSSSFFSEIQCKTKSLLPNTGVYDLSGFTVKPVATVHRRIPDLPDCDIDKWLNNFNVPSPLNWERKIFSNCNFNLSTLLRLVHTDSFSCNNFDESKIYGSCFKSIVLDKFAIPNSRRSDLQLGSSGFLQSSNYKIDTTSSSCQLYYSLPAINVTINNYNPSSWNRRYGFNNFNLSSHSVVYSRYCFSVNNTFCPCAKPSFASSCKSHKPPSASCPIGTNYRSCESTTVLDHTDWCRCSCLPDPITAYDPRSCSQKKSLVGVGEHCAGFGVDEEKCGVLDGSYNVSCLCSTDAFLGWSYDTCVSNNRCNIFSNFILNGINSGTTCSNDLLQPNTEVYTDVCVDYDLYGITGQGIFKEVSAVYYNSWQNLLYDSNGNIIGFKDFVTNKTYNIFPCYAGRVSAAFHQNASSLALLYRNLKCSYVLNNISLATQPYFDSYLGCVFNADNLTDYSVSSCALRMGSGFCVDYNSPSFSSSGSKGSSISASYRFVTFEPFNVSFVNDSIESVGGLYEIKIPTNFTIVGQEEFIQTNSPKVTIDCSLFVCSNYAACHDLLSEYGTFCDNINSILDEVNGLLDTTQLHVADTLMQGVTLSSNLNTNLHFDVDNINFKSLVGCLGPHCGSPSASFFEDLLFDKVKLSDVGFVEAYNNCTGGSEIRDLLCVQSFNGIKVLPPILSESQISGYTTAATVAAMFPPWSAPAGIPFSLNVQYRINGLGVTMDVLNKNQKLIATAFNNALLSIQNGFSPTNSALAKIQSVVNSNAQALNSLLQQLFNKFGAISSSLQEILSRLDPPEAQVQIDRLINGRLTALNAYVSQQLSDISLVKFGAALAMEKVNECVKSQSPRINFCGNGNHILSLVQNAPYGLLFMHFSYKPISFKTVLVSPGLCISGDVGIAPKQGYFIKHNDHWMFTGSSYYYPEPISDKNVVFMNTCSVNFTKAPLVYLNHSVPKLSDFESELSHWFKNQTSIAPNLTLNLHTINATFLDLYYEMNLIQESIKSLNNSYINLKDIGTYEMYVKWPGSGSGSGSGSGSGSGSMGGWSSKPRQGMGTNLSVPNPLGFFPDHQLDPAFGANSNNPDWDFNPNKDQWPEANQVGAGAFGPGFTPPHGGLLGWSPQAQGILTTVPAAPPPASTNRQSGRQPTPISPPLRDSHPQAMQWNSTTFHQALLDPRVRGLYFPAGGSSSGTVNPVPTTASPISSIFSRTGDPAPNMENTTSGFLGPLLVLQAGFFLLTRILTIPQSLDSWWTSLNFLGGAPTCPGQNSQSPTSNHSPTSCPPICPGYRWMCLRRFIIFLFILLLCLIFLLVLLDYQGMLPVCPLLPGTSTTSTGPCKTCTIPAQGTSMFPSCCCTKPSDGNCTCIPIPSSWAFARFLWEWASVRFSWLSLLVPFVQWFVGLSPTVWLSVIWMMWYWGPSLYNILSPFLPLLPIFFCLWVYI

SEQ ID NO: 362 - protein, 1536 aa, synthetic construct
  REGION 1..1536: note = Recombinant Sequence
MFVLLVAYALLHIAGCQTTNGMNTSHSVCNGCVGHSENVFAVESGGYIPSNFAFNNWFLLTNTSSVVDGVVRSFQPLLLNCLWSVSGSRLTTGFVYFNGTGRGACKGFYSNASSDVIRYNINFEENLRRGTILFKTSYGAVVFYCTNNTLVSGDAHIPSGTVLGNFYCFVNTTIGNETTSAFVGALPKTVREFVISRTGHFYINGYRYFSLGNVEAVNFNVTNAATTVCTVALASYADVLVNVSQTAIANIIYCNSVINRLRCDQLSFDVPDGFYSTSPIQSVELPVSIVSLPVYHKHTFIVLYVNFELRRGPGRCYNCRPAVVNITLANFNETKGPLCVDTSHFTTQFFGVKFDRWSASINTGNCPFSFGKVNNFVKFGSVCFSLKDIPGGCAMPIMANLANLNSHNIGSLYVSWSDGDVITGVPKPVEGVSSFMNVTLNKCTKYNIYDVSGVGVIRISNDTFLNGITYTSTSGNLLGFKDVTNGTIYSITPCNPPDQLVVYQQAVVGAMLSENFTSYGFSNVVEMPKFFYASNGTYNCTDAVLTYSSFGVCADGSIIAVQPGNVSYDSVSAIVTANLSIPSNWTTSVQVEYLQITSTPIVVDCSTYVCNGNVRCVELLKQYTSACKTIEDALRNSAMLESADVSEMLTFDKKAFTLANVSSFGDYNLSSVIPSLPRSGSGVPGSSAIEDILFSKLVTSGLGTVDADYKKCTKGLSIADLACAQYYNGIMVLPGVADAERMAMYTGSLIGGIALGGLTSPASIPFSLAIQSRLNYVALQTDVLQENQKILAASFNKAMTNIVDAFTGVNDPITQTSQALQTVATALNKIQDVVNQQGNSLNHLTSQLRQNFQAISSSIQAIYDRLDPPQADQQVDRLITGRLAALNVFVSHTLTKYTEVRASRQLAQQKVNECVKSQSKRYGFCGNGTHIFSLVNAAPEGLVFLHTVLLPTQYKDVEAWSGLCVDGRNGYVLRQPNLALYKEGNYYRITSRIMFEPRIPTIADFVQIENCNVTFVNISRSELQTIVPEYIDVNKTLQELSYKLPNYTVPDLVVEQYNQTILNLTSEISTLENKSAELNYTVQKLQTLIDNINSTLVDLKWLNRVETYIKWPGSGSGSGSGSGSGSGSGSGSGSGSMGGWSSKPRQGMGTNLSVPNPLGFFPDHQLDPAFGANSNNPDWDFNPNKDQWPEANQVGAGAFGPGFTPPHGGLLGWSPQAQGILTTVPAAPPPASTNRQSGRQPTPISPPLRDSHPQAMQWNSTTFHQALLDPRVRGLYFPAGGSSSGTVNPVPTTASPISSIFSRTGDPAPNMENTTSGFLGPLLVLQAGFFLLTRILTIPQSLDSWWTSLNFLGGAPTCPGQNSQSPTSNHSPTSCPPICPGYRWMCLRRFIIFLFILLLCLIFLLVLLDYQGMLPVCPLLPGTSTTSTGPCKTCTIPAQGTSMFPSCCCTKPSDGNCTCIPIPSSWAFARFLWEWASVRFSWLSLLVPFVQWFVGLSPTVWLSVIWMMWYWGPSLYNILSPFLPLLPIFFCLWVYI

SEQ ID NO: 363 - protein, 1720 aa, synthetic construct
  REGION 1..1720: note = Recombinant Sequence
MKLFLILLVLPLASCFFTCNSNANLSMLQLGVPDNSSTIVTGLLPTHWFCANQSTSVYSANGFFYIDVGNHRSAFALHTGYYDVNQYYIYVTNEIGLNASVTLKICKFGINTTFDFLSNSSSSFDCIVNLLFTEQLGAPLGITISGETVRLHLYNVTRTFYVPAAYKLTKLSVKCYFNYSCVFSVVNATVTVNVTTHNGRVVNYTVCDDCNGYTDNIFSVQQDGRIPNGFPFNNWFLLTNGSTLVDGVSRLYQPLRLTCLWPVPGLKSSTGFVYFNATGSDVNCNGYQHNSVADVMRYNLNFSANSVDNLKSGVIVFKTLQYDVLFYCSNSSSGVLDTTIPFGPSSQPYYCFINSTINTTHVSTFVGILPPTVREIVVARTGQFYINGFKYFDLGFIEAVNFNVTTASATDFWTVAFATFVDVLVNVSATKIQNLLYCDSPFEKLQCEHLQFGLQDGFYSANFLDDNVLPETYVALPIYYQHTDINFTATASFGGSCYVCKPHQVNISLNGNTSVCVRTSHFSIRYIYNRVKSGSPGDSSWHIYLKSGTCPFSFSKLNNFQKFKTICFSTVEVPGSCNFPLEATWHYTSYTIVGALYVTWSEGNSITGVPYPVSGIREFSNLVLNNCTKYNIYDYVGTGIIRSSNQSLAGGITYVSNSGNLLGFKNVSTGNIFIVTPCNQPDQVAVYQQSIIGAMTAVNESRYGLQNLLQLPNFYYVSNGGNNCTTAVMTYSNFGICADGSLIPVGPGNSSDNGISAIITANLSIPSNWTTSVQVEYLQITSTPIVVDCATYVCNGNPRCKNLLKQYTSACKTIEDALRLSAHLETNDVSSMLTFDSNAFSLANVTSFGDYNLSSVLPQRNIGSSGIAGSSPLEDLLFSKVVTSGLGTVDVDYKSCTKGLSIADLACAQYYNGIMVLPGVADAERMAMYTGSLIGGMVLGGLTSAPAIPFSLALQARLNYVALQTDVLQENQKILAASFNKAINNIVASFSSVNDPITQTAEAIHTVTIALNKIQDVVNQQGSALNHLTSQLRHNFQAISNSIQAIYDRLDPPQADQQVDRLITGRLAALNAFVSQVLNKYTEVRSSRRLAQQKVNECVKSQSNRYGFCGNGTHIFSIVNSAPDGLLFLHTVLLPTDYKNVKAWSGICVDGIYGYVLRQPNLVLYSDNGVFRVTSRIMFQPRLPVLSDFVQIYNCNVTFVNISRVELHTVIPDYVDVNKTLQEFAQNLPKYVKPNFDLTPFNLTYLNLSSELKQLEAKTASLFQTTVELQGLIDQINSTYVDLKLLNRFENYIKWPGSGSGSGSGSGSGSGSGSGSGSGSMGGWSSKPRQGMGTNLSVPNPLGFFPDHQLDPAFGANSNNPDWDFNPNKDQWPEANQVGAGAFGPGFTPPHGGLLGWSPQAQGILTTVPAAPPPASTNRQSGRQPTPISPPLRDSHPQAMQWNSTTFHQALLDPRVRGLYFPAGGSSSGTVNPVPTTASPISSIFSRTGDPAPNMENTTSGFLGPLLVLQAGFFLLTRILTIPQSLDSWWTSLNFLGGAPTCPGQNSQSPTSNHSPTSCPPICPGYRWMCLRRFIIFLFILLLCLIFLLVLLDYQGMLPVCPLLPGTSTTSTGPCKTCTIPAQGTSMFPSCCCTKPSDGNCTCIPIPSSWAFARFLWEWASVRFSWLSLLVPFVQWFVGLSPTVWLSVIWMMWYWGPSLYNILSPFLPLLPIFFCLWVYI

SEQ ID NO: 364 - protein, 1726 aa, synthetic construct
  REGION 1..1726: note = Recombinant Sequence
MFLILLISLPTAFAVIGDLNCPLDPKLKGSFNNRDTGSPSISTDTVDVTNGLGTYYVLDRVYLNTTLFLNGYYPTSGSTYRNMALKGTDLLSTLWFKPPFLSDFINGIFAKVKNTKVFKDGVMYSEFPAITIGSTFVNTSYSVVVQPRTINSTQDGVNKLQGLLEVSVCQYNMCEHPHTICHPNLGNHFKELWHLDTGVVSCLYKRNFTYDVNATYLYFHFYQEGGTFYAYFTDTGFVTKFLFNVYLGMALSHYYVMPLTCISRRDIGFTLEYWVTPLTPRQYLLAFNQDGIIFNAVDCMSDFMSEIKCKTQSIAPPTGVYELNGYTVQPIADVYRRKPDLPNCNIEAWLNDKSVPSPLNWERKTFSNCNFNMSSLMSFIQADSFTCNNIDAAKIYGMCFSSITIDKFAIPNRRKVDLQLGNLGYLQSSNYRIDTTATSCQLYYNLPAANVSVSRFNPSTWNKRFGFIEDSVFVPQPTGVFTNHSVVYAQHCFKAPKNFCPCSSCPGKNNGIGTCPAGTNSLTCDNLCTLDPITFKAPDTYKCPQTKSLVGIGEHCSGLAVKSDYCGNNSCTCQPQAFLGWSADSCLQGDKCNIFANFILHDVNNGLTCSTDLQKANTEIELGVCVNYDLYGISGQGIFVEVNATYYNSWQNLLYDSNGNLYGFRDYITNRTFMIHSCYSGRVSAAYHANSPEPALLFRNIKCNYVFNNSLTRQLQPINYSFDSYLGCVVNAYNSTAISVQTCDLTVGSGYCVDYSKNSGSGSAITTGYRFTNFEPFTVNSVNDSLEPVGGLYEIQIPSEFTIGNMEEFIQTSSPKVTIDCAAFVCGDYAACKLQLVEYGSFCDNINAILTEVNELLDTTQLQVANSLMNGVTLSTKLKDGVNFNVDDINFSPVLGCLGSECSKPSSASAIEDLLFDKVKLSDVGFVEAYNNCTGGAEIRDLICVQSYKGIKVLPPLLSENQISGYTLAATSASLFPPWTAPAGVPFYLNVQYRINGLGVTMDVLSQNQKLIANAFNNALHAIQQGFDPTNSALVKIQAVVNANSEALNNLLQQLSNRFGAISASLQEILSRLDPPEAEAQIDRLINGRLTALNAYVSQQLSDSTLVKFSAAQAMEKVNECVKSQSSRINFCGNGNHIISLVQNAPYGLYFIHFNYVPTKYVTAKVSPGLCIAGNRGIAPKSGYFVNVNNTWMYTGSGYYYPEPITENNVVVMSTCAVNYTKAPYVMLNTSIPNLPDFKEELGQWFKNQTSVAPDLSLDYINVTFLDLQVEMNRLQEAIKVLNHSYINLKDIGTYEYYVKWPGSGSGSGSGSGSGSGSGSGSGSGSMGGWSSKPRQGMGTNLSVPNPLGFFPDHQLDPAFGANSNNPDWDFNPNKDQWPEANQVGAGAFGPGFTPPHGGLLGWSPQAQGILTTVPAAPPPASTNRQSGRQPTPISPPLRDSHPQAMQWNSTTFHQALLDPRVRGLYFPAGGSSSGTVNPVPTTASPISSIFSRTGDPAPNMENTTSGFLGPLLVLQAGFFLLTRILTIPQSLDSWWTSLNFLGGAPTCPGQNSQSPTSNHSPTSCPPICPGYRWMCLRRFIIFLFILLLCLIFLLVLLDYQGMLPVCPLLPGTSTTSTGPCKTCTIPAQGTSMFPSCCCTKPSDGNCTCIPIPSSWAFARFLWEWASVRFSWLSLLVPFVQWFVGLSPTVWLSVIWMMWYWGPSLYNILSPFLPLLPIFFCLWVYI

SEQ ID NO: 365 - protein, 1724 aa, synthetic construct
  REGION 1..1724: note = Recombinant Sequence
MLLIIFILPTTLAVIGDFNCTNFAINDKNTTVPRISEYVVDVSYGLGTYYILDRVYLNTTILFTGYFPKSGANFRDLSLKGTTYLSTLWYQKPFLSDFNNGIFSRVKNTKLYVNKTLYSEFSTIVIGSVFINNSYTIVVQPHNGVLEITACQYTMCEYPHTICKSKGSSRNESWHFDKSEPLCLFKKNFTYNVSTDFLYFHFYQERGTFYAYYADSGMPTTFLFSLYLGTLLSHYYVLPLTCNAISSNTDNETLQYWVTPLSKRQYLLKFDNRGVITNAVDCSSSFFSEIQCKTKSLLPNTGVYDLSGFTVKPVATVHRRIPDLPDCDIDKWLNNFNVPSPLNWERKIFSNCNFNLSTLLRLVHTDSFSCNNFDESKIYGSCFKSIVLDKFAIPNSRRSDLQLGSSGFLQSSNYKIDTTSSSCQLYYSLPAINVTINNYNPSSWNRRYGFNNFNLSSHSVVYSRYCFSVNNTFCPCAKPSFASSCKSHKPPSASCPIGTNYRSCESTTVLDHTDWCRCSCLPDPITAYDPRSCSQKKSLVGVGEHCAGFGVDEEKCGVLDGSYNVSCLCSTDAFLGWSYDTCVSNNRCNIFSNFILNGINSGTTCSNDLLQPNTEVYTDVCVDYDLYGITGQGIFKEVSAVYYNSWQNLLYDSNGNIIGFKDFVTNKTYNIFPCYAGRVSAAFHQNASSLALLYRNLKCSYVLNNISLATQPYFDSYLGCVFNADNLTDYSVSSCALRMGSGFCVDYNSPSFSSSGSKGSSISASYRFVTFEPFNVSFVNDSIESVGGLYEIKIPTNFTIVGQEEFIQTNSPKVTIDCSLFVCSNYAACHDLLSEYGTFCDNINSILDEVNGLLDTTQLHVADTLMQGVTLSSNLNTNLHFDVDNINFKSLVGCLGPHCGSPSASFFEDLLFDKVKLSDVGFVEAYNNCTGGSEIRDLLCVQSFNGIKVLPPILSESQISGYTTAATVAAMFPPWSAPAGIPFSLNVQYRINGLGVTMDVLNKNQKLIATAFNNALLSIQNGFSPTNSALAKIQSVVNSNAQALNSLLQQLFNKFGAISSSLQEILSRLDPPEAQVQIDRLINGRLTALNAYVSQQLSDISLVKFGAALAMEKVNECVKSQSPRINFCGNGNHILSLVQNAPYGLLFMHFSYKPISFKTVLVSPGLCISGDVGIAPKQGYFIKHNDHWMFTGSSYYYPEPISDKNVVFMNTCSVNFTKAPLVYLNHSVPKLSDFESELSHWFKNQTSIAPNLTLNLHTINATFLDLYYEMNLIQESIKSLNNSYINLKDIGTYEMYVKWPGSGSGSGSGSGSGSGSGSGSGSGSMGGWSSKPRQGMGTNLSVPNPLGFFPDHQLDPAFGANSNNPDWDFNPNKDQWPEANQVGAGAFGPGFTPPHGGLLGWSPQAQGILTTVPAAPPPASTNRQSGRQPTPISPPLRDSHPQAMQWNSTTFHQALLDPRVRGLYFPAGGSSSGTVNPVPTTASPISSIFSRTGDPAPNMENTTSGFLGPLLVLQAGFFLLTRILTIPQSLDSWWTSLNFLGGAPTCPGQNSQSPTSNHSPTSCPPICPGYRWMCLRRFIIFLFILLLCLIFLLVLLDYQGMLPVCPLLPGTSTTSTGPCKTCTIPAQGTSMFPSCCCTKPSDGNCTCIPIPSSWAFARFLWEWASVRFSWLSLLVPFVQWFVGLSPTVWLSVIWMMWYWGPSLYNILSPFLPLLPIFFCLWVYI

SEQ ID NO: 366 - protein, 1544 aa, synthetic construct
  REGION 1..1544: note = Recombinant Sequence
MFVLLVAYALLHIAGCQTTNGMNTSHSVCNGCVGHSENVFAVESGGYIPSNFAFNNWFLLTNTSSVVDGVVRSFQPLLLNCLWSVSGSRLTTGFVYFNGTGRGACKGFYSNASSDVIRYNINFEENLRRGTILFKTSYGAVVFYCTNNTLVSGDAHIPSGTVLGNFYCFVNTTIGNETTSAFVGALPKTVREFVISRTGHFYINGYRYFSLGNVEAVNFNVTNAATTVCTVALASYADVLVNVSQTAIANIIYCNSVINRLRCDQLSFDVPDGFYSTSPIQSVELPVSIVSLPVYHKHTFIVLYVNFELRRGPGRCYNCRPAVVNITLANFNETKGPLCVDTSHFTTQFFGVKFDRWSASINTGNCPFSFGKVNNFVKFGSVCFSLKDIPGGCAMPIMANLANLNSHNIGSLYVSWSDGDVITGVPKPVEGVSSFMNVTLNKCTKYNIYDVSGVGVIRISNDTFLNGITYTSTSGNLLGFKDVTNGTIYSITPCNPPDQLVVYQQAVVGAMLSENFTSYGFSNVVEMPKFFYASNGTYNCTDAVLTYSSFGVCADGSIIAVQPGNVSYDSVSAIVTANLSIPSNWTTSVQVEYLQITSTPIVVDCSTYVCNGNVRCVELLKQYTSACKTIEDALRNSAMLESADVSEMLTFDKKAFTLANVSSFGDYNLSSVIPSLPRSGSGVPGSSAIEDILFSKLVTSGLGTVDADYKKCTKGLSIADLACAQYYNGIMVLPGVADAERMAMYTGSLIGGIALGGLTSPASIPFSLAIQSRLNYVALQTDVLQENQKILAASFNKAMTNIVDAFTGVNDPITQTSQALQTVATALNKIQDVVNQQGNSLNHLTSQLRQNFQAISSSIQAIYDRLDPPQADQQVDRLITGRLAALNVFVSHTLTKYTEVRASRQLAQQKVNECVKSQSKRYGFCGNGTHIFSLVNAAPEGLVFLHTVLLPTQYKDVEAWSGLCVDGRNGYVLRQPNLALYKEGNYYRITSRIMFEPRIPTIADFVQIENCNVTFVNISRSELQTIVPEYIDVNKTLQELSYKLPNYTVPDLVVEQYNQTILNLTSEISTLENKSAELNYTVQKLQTLIDNINSTLVDLKWLNRVETYIKWPGSGSGSGSGSGSGSGSGSGSGSGSGSGSGSGSMGGWSSKPRQGMGTNLSVPNPLGFFPDHQLDPAFGANSNNPDWDFNPNKDQWPEANQVGAGAFGPGFTPPHGGLLGWSPQAQGILTTVPAAPPPASTNRQSGRQPTPISPPLRDSHPQAMQWNSTTFHQALLDPRVRGLYFPAGGSSSGTVNPVPTTASPISSIFSRTGDPAPNMENTTSGFLGPLLVLQAGFFLLTRILTIPQSLDSWWTSLNFLGGAPTCPGQNSQSPTSNHSPTSCPPICPGYRWMCLRRFIIFLFILLLCLIFLLVLLDYQGMLPVCPLLPGTSTTSTGPCKTCTIPAQGTSMFPSCCCTKPSDGNCTCIPIPSSWAFARFLWEWASVRFSWLSLLVPFVQWFVGLSPTVWLSVIWMMWYWGPSLYNILSPFLPLLPIFFCLWVYI

SEQ ID NO: 367 - protein, 1728 aa, synthetic construct
  REGION 1..1728: note = Recombinant Sequence
MKLFLILLVLPLASCFFTCNSNANLSMLQLGVPDNSSTIVTGLLPTHWFCANQSTSVYSANGFFYIDVGNHRSAFALHTGYYDVNQYYIYVTNEIGLNASVTLKICKFGINTTFDFLSNSSSSFDCIVNLLFTEQLGAPLGITISGETVRLHLYNVTRTFYVPAAYKLTKLSVKCYFNYSCVFSVVNATVTVNVTTHNGRVVNYTVCDDCNGYTDNIFSVQQDGRIPNGFPFNNWFLLTNGSTLVDGVSRLYQPLRLTCLWPVPGLKSSTGFVYFNATGSDVNCNGYQHNSVADVMRYNLNFSANSVDNLKSGVIVFKTLQYDVLFYCSNSSSGVLDTTIPFGPSSQPYYCFINSTINTTHVSTFVGILPPTVREIVVARTGQFYINGFKYFDLGFIEAVNFNVTTASATDFWTVAFATFVDVLVNVSATKIQNLLYCDSPFEKLQCEHLQFGLQDGFYSANFLDDNVLPETYVALPIYYQHTDINFTATASFGGSCYVCKPHQVNISLNGNTSVCVRTSHFSIRYIYNRVKSGSPGDSSWHIYLKSGTCPFSFSKLNNFQKFKTICFSTVEVPGSCNFPLEATWHYTSYTIVGALYVTWSEGNSITGVPYPVSGIREFSNLVLNNCTKYNIYDYVGTGIIRSSNQSLAGGITYVSNSGNLLGFKNVSTGNIFIVTPCNQPDQVAVYQQSIIGAMTAVNESRYGLQNLLQLPNFYYVSNGGNNCTTAVMTYSNFGICADGSLIPVGPGNSSDNGISAIITANLSIPSNWTTSVQVEYLQITSTPIVVDCATYVCNGNPRCKNLLKQYTSACKTIEDALRLSAHLETNDVSSMLTFDSNAFSLANVTSFGDYNLSSVLPQRNIGSSGIAGSSPLEDLLFSKVVTSGLGTVDVDYKSCTKGLSIADLACAQYYNGIMVLPGVADAERMAMYTGSLIGGMVLGGLTSAPAIPFSLALQARLNYVALQTDVLQENQKILAASFNKAINNIVASFSSVNDPITQTAEAIHTVTIALNKIQDVVNQQGSALNHLTSQLRHNFQAISNSIQAIYDRLDPPQADQQVDRLITGRLAALNAFVSQVLNKYTEVRSSRRLAQQKVNECVKSQSNRYGFCGNGTHIFSIVNSAPDGLLFLHTVLLPTDYKNVKAWSGICVDGIYGYVLRQPNLVLYSDNGVFRVTSRIMFQPRLPVLSDFVQIYNCNVTFVNISRVELHTVIPDYVDVNKTLQEFAQNLPKYVKPNFDLTPFNLTYLNLSSELKQLEAKTASLFQTTVELQGLIDQINSTYVDLKLLNRFENYIKWPGSGSGSGSGSGSGSGSGSGSGSGSGSGSGSGSMGGWSSKPRQGMGTNLSVPNPLGFFPDHQLDPAFGANSNNPDWDFNPNKDQWPEANQVGAGAFGPGFTPPHGGLLGWSPQAQGILTTVPAAPPPASTNRQSGRQPTPISPPLRDSHPQAMQWNSTTFHQALLDPRVRGLYFPAGGSSSGTVNPVPTTASPISSIFSRTGDPAPNMENTTSGFLGPLLVLQAGFFLLTRILTIPQSLDSWWTSLNFLGGAPTCPGQNSQSPTSNHSPTSCPPICPGYRWMCLRRFIIFLFILLLCLIFLLVLLDYQGMLPVCPLLPGTSTTSTGPCKTCTIPAQGTSMFPSCCCTKPSDGNCTCIPIPSSWAFARFLWEWASVRFSWLSLLVPFVQWFVGLSPTVWLSVIWMMWYWGPSLYNILSPFLPLLPIFFCLWVYI

SEQ ID NO: 368 - protein, 1734 aa, synthetic construct
  REGION 1..1734: note = Recombinant Sequence
MFLILLISLPTAFAVIGDLNCPLDPKLKGSFNNRDTGSPSISTDTVDVTNGLGTYYVLDRVYLNTTLFLNGYYPTSGSTYRNMALKGTDLLSTLWFKPPFLSDFINGIFAKVKNTKVFKDGVMYSEFPAITIGSTFVNTSYSVVVQPRTINSTQDGVNKLQGLLEVSVCQYNMCEHPHTICHPNLGNHFKELWHLDTGVVSCLYKRNFTYDVNATYLYFHFYQEGGTFYAYFTDTGFVTKFLFNVYLGMALSHYYVMPLTCISRRDIGFTLEYWVTPLTPRQYLLAFNQDGIIFNAVDCMSDFMSEIKCKTQSIAPPTGVYELNGYTVQPIADVYRRKPDLPNCNIEAWLNDKSVPSPLNWERKTFSNCNFNMSSLMSFIQADSFTCNNIDAAKIYGMCFSSITIDKFAIPNRRKVDLQLGNLGYLQSSNYRIDTTATSCQLYYNLPAANVSVSRFNPSTWNKRFGFIEDSVFVPQPTGVFTNHSVVYAQHCFKAPKNFCPCSSCPGKNNGIGTCPAGTNSLTCDNLCTLDPITFKAPDTYKCPQTKSLVGIGEHCSGLAVKSDYCGNNSCTCQPQAFLGWSADSCLQGDKCNIFANFILHDVNNGLTCSTDLQKANTEIELGVCVNYDLYGISGQGIFVEVNATYYNSWQNLLYDSNGNLYGFRDYITNRTFMIHSCYSGRVSAAYHANSPEPALLFRNIKCNYVFNNSLTRQLQPINYSFDSYLGCVVNAYNSTAISVQTCDLTVGSGYCVDYSKNSGSGSAITTGYRFTNFEPFTVNSVNDSLEPVGGLYEIQIPSEFTIGNMEEFIQTSSPKVTIDCAAFVCGDYAACKLQLVEYGSFCDNINAILTEVNELLDTTQLQVANSLMNGVTLSTKLKDGVNFNVDDINFSPVLGCLGSECSKPSSASAIEDLLFDKVKLSDVGFVEAYNNCTGGAEIRDLICVQSYKGIKVLPPLLSENQISGYTLAATSASLFPPWTAPAGVPFYLNVQYRINGLGVTMDVLSQNQKLIANAFNNALHAIQQGFDPTNSALVKIQAVVNANSEALNNLLQQLSNRFGAISASLQEILSRLDPPEAEAQIDRLINGRLTALNAYVSQQLSDSTLVKFSAAQAMEKVNECVKSQSSRINFCGNGNHIISLVQNAPYGLYFIHFNYVPTKYVTAKVSPGLCIAGNRGIAPKSGYFVNVNNTWMYTGSGYYYPEPITENNVVVMSTCAVNYTKAPYVMLNTSIPNLPDFKEELGQWFKNQTSVAPDLSLDYINVTFLDLQVEMNRLQEAIKVLNHSYINLKDIGTYEYYVKWPGSGSGSGSGSGSGSGSGSGSGSGSGSGSGSGSMGGWSSKPRQGMGTNLSVPNPLGFFPDHQLDPAFGANSNNPDWDFNPNKDQWPEANQVGAGAFGPGFTPPHGGLLGWSPQAQGILTTVPAAPPPASTNRQSGRQPTPISPPLRDSHPQAMQWNSTTFHQALLDPRVRGLYFPAGGSSSGTVNPVPTTASPISSIFSRTGDPAPNMENTTSGFLGPLLVLQAGFFLLTRILTIPQSLDSWWTSLNFLGGAPTCPGQNSQSPTSNHSPTSCPPICPGYRWMCLRRFIIFLFILLLCLIFLLVLLDYQGMLPVCPLLPGTSTTSTGPCKTCTIPAQGTSMFPSCCCTKPSDGNCTCIPIPSSWAFARFLWEWASVRFSWLSLLVPFVQWFVGLSPTVWLSVIWMMWYWGPSLYNILSPFLPLLPIFFCLWVYI

SEQ ID NO: 369 - protein, 1732 aa, synthetic construct
  REGION 1..1732: note = Recombinant Sequence
MLLIIFILPTTLAVIGDFNCTNFAINDKNTTVPRISEYVVDVSYGLGTYYILDRVYLNTTILFTGYFPKSGANFRDLSLKGTTYLSTLWYQKPFLSDFNNGIFSRVKNTKLYVNKTLYSEFSTIVIGSVFINNSYTIVVQPHNGVLEITACQYTMCEYPHTICKSKGSSRNESWHFDKSEPLCLFKKNFTYNVSTDFLYFHFYQERGTFYAYYADSGMPTTFLFSLYLGTLLSHYYVLPLTCNAISSNTDNETLQYWVTPLSKRQYLLKFDNRGVITNAVDCSSSFFSEIQCKTKSLLPNTGVYDLSGFTVKPVATVHRRIPDLPDCDIDKWLNNFNVPSPLNWERKIFSNCNFNLSTLLRLVHTDSFSCNNFDESKIYGSCFKSIVLDKFAIPNSRRSDLQLGSSGFLQSSNYKIDTTSSSCQLYYSLPAINVTINNYNPSSWNRRYGFNNFNLSSHSVVYSRYCFSVNNTFCPCAKPSFASSCKSHKPPSASCPIGTNYRSCESTTVLDHTDWCRCSCLPDPITAYDPRSCSQKKSLVGVGEHCAGFGVDEEKCGVLDGSYNVSCLCSTDAFLGWSYDTCVSNNRCNIFSNFILNGINSGTTCSNDLLQPNTEVYTDVCVDYDLYGITGQGIFKEVSAVYYNSWQNLLYDSNGNIIGFKDFVTNKTYNIFPCYAGRVSAAFHQNASSLALLYRNLKCSYVLNNISLATQPYFDSYLGCVFNADNLTDYSVSSCALRMGSGFCVDYNSPSFSSSGSKGSSISASYRFVTFEPFNVSFVNDSIESVGGLYEIKIPTNFTIVGQEEFIQTNSPKVTIDCSLFVCSNYAACHDLLSEYGTFCDNINSILDEVNGLLDTTQLHVADTLMQGVTLSSNLNTNLHFDVDNINFKSLVGCLGPHCGSPSASFFEDLLFDKVKLSDVGFVEAYNNCTGGSEIRDLLCVQSFNGIKVLPPILSESQISGYTTAATVAAMFPPWSAPAGIPFSLNVQYRINGLGVTMDVLNKNQKLIATAFNNALLSIQNGFSPTNSALAKIQSVVNSNAQALNSLLQQLFNKFGAISSSLQEILSRLDPPEAQVQIDRLINGRLTALNAYVSQQLSDISLVKFGAALAMEKVNECVKSQSPRINFCGNGNHILSLVQNAPYGLLFMHFSYKPISFKTVLVSPGLCISGDVGIAPKQGYFIKHNDHWMFTGSSYYYPEPISDKNVVFMNTCSVNFTKAPLVYLNHSVPKLSDFESELSHWFKNQTSIAPNLTLNLHTINATFLDLYYEMNLIQESIKSLNNSYINLKDIGTYEMYVKWPGSGSGSGSGSGSGSGSGSGSGSGSGSGSGSGSMGGWSSKPRQGMGTNLSVPNPLGFFPDHQLDPAFGANSNNPDWDFNPNKDQWPEANQVGAGAFGPGFTPPHGGLLGWSPQAQGILTTVPAAPPPASTNRQSGRQPTPISPPLRDSHPQAMQWNSTTFHQALLDPRVRGLYFPAGGSSSGTVNPVPTTASPISSIFSRTGDPAPNMENTTSGFLGPLLVLQAGFFLLTRILTIPQSLDSWWTSLNFLGGAPTCPGQNSQSPTSNHSPTSCPPICPGYRWMCLRRFIIFLFILLLCLIFLLVLLDYQGMLPVCPLLPGTSTTSTGPCKTCTIPAQGTSMFPSCCCTKPSDGNCTCIPIPSSWAFARFLWEWASVRFSWLSLLVPFVQWFVGLSPTVWLSVIWMMWYWGPSLYNILSPFLPLLPIFFCLWVYI

SEQ ID NO: 370 - DNA, 21 bp, synthetic construct
  misc_feature 1..21: note = Recombinant Sequence
  source 1..21: mol_type = other DNA
ccgtctgtgccttctcatctg

SEQ ID NO: 371 - DNA, 27 bp, synthetic construct
  misc_feature 1..27: note = Recombinant Sequence
  source 1..27: mol_type = other DNA
agtccaagagtcctcttatacaagacc

SEQ ID NO: 372 - DNA, 19 bp, synthetic construct
  misc_feature 1..19: note = Recombinant Sequence
  source 1..19: mol_type = other DNA
ccgtgtgcacttcgcttca

1. A nucleic acid molecule encoding a fusion protein comprising:
a recombinant SARS-CoV-2 spike(S) ectodomain comprising F817P, A892P, A899P, A942P, K986P, and V987P substitutions and an amino acid sequence at least 90% identical to residues 14-1206 of SEQ ID NO: 2 fused via a peptide linker to a hepatitis B surface antigen (HBsAg) protein.

2. The nucleic acid molecule of claim 1, wherein the fusion protein self-assembles when expressed in mammalian cells to form a HBsAg nanoparticle with SARS-CoV-2 S ectodomain trimers extending radially outward from an outer surface of the HBsAg nanoparticle.

3. The nucleic acid molecule of claim 1, wherein a S1/S2 protease cleavage site of the SARS-CoV-2 S ectodomain is mutated to inhibit protease cleavage.

4. The nucleic acid molecule of claim 1, wherein the S1/S2 protease cleavage site is mutated by a RRAR (682-685)-to-GSAS substitution.

5. The nucleic acid molecule of claim 1, wherein the SARS-CoV-2 S ectodomain comprises one or more of: K417N, L452R, T478K, E484K, E484Q, N501Y, and P681R substitutions.

6. The nucleic acid molecule of claim 1, wherein the SARS-CoV-2 S ectodomain comprises one of a N501Y substitution;
a E484K substitution;
N501Y, K417N, and E484K substitutions;
L452R, T478K, and P681R substitutions; or
L452R, E484Q, and P681R substitutions.

7. The nucleic acid molecule of claim 1, wherein the SARS-CoV-2 S ectodomain comprises the F817P, A892P, A899P, A942P, K986P, V987P, and RRAR (682-685)-to-GSAS substitutions and an amino acid sequence at least 90% identical, at least 95% identical, at least 99% identical, or identical, to:
residues 14-1206 of SEQ ID NOs: 3, 19 or 20;
residues 14-1205 of SEQ ID NOs: 21-23 or 30;
residues 14-1208 of SEQ ID NOs: 16, 24-25, 28-29, 31-32, 34-36, 38-42, or 44;
residues 14-1201 of SEQ ID NO: 26;
residues 14-1200 of SEQ ID NO: 27;
residues 14-1203 of SEQ ID NO: 37; or
residues 14-1207 of SEQ ID NOs: 33 and 43.

8. The nucleic acid molecule of claim 1, wherein the SARS-CoV-2 S ectodomain comprises the F817P, A892P, A899P, A942P, K986P, V987P, and RRAR (682-685)-to-GSAS substitutions and an amino acid sequence at least 90% identical, at least 95% identical, at least 99% identical, or identical to residues 14-1206 of SEQ ID NO: 3.

9. The nucleic acid molecule of claim 1, wherein the peptide linker is from 12-39 amino acid residues in length.

10. The nucleic acid molecule of claim 9, wherein the peptide linker is from 12-32 residues in length.

11. The nucleic acid molecule of claim 9, wherein the peptide linker is 24 or 32 residues in length.

12. The nucleic acid molecule of claim 1, wherein the peptide linker is a glycine-serine linker.

13. The nucleic acid molecule of claim 12, wherein the glycine-serine peptide linker is a repeat of glycine-serine dipeptides.

14. The nucleic acid molecule of claim 1, wherein the sequence of the peptide linker is set forth as any one of SEQ ID NOs: 4-7.

15. The nucleic acid molecule of claim 1, wherein the HBsAg protein comprises or consists of a HBsAg S protein, a HBsAg M protein, or a HBsAg L protein.

16. (canceled)

17. The nucleic acid molecule of claim 15, wherein the HBsAg protein comprises or consists of an amino acid sequence at least 90% identical, at least 95% identical, at least 99% identical, or identical, to any one of SEQ ID NOs: 9 or 45-56.

18. (canceled)

19. The nucleic acid molecule of claim 1, wherein the fusion protein comprises or consists of an amino acid sequence at least 90% identical, at least 95% identical, at least 99% identical, or identical, to residues 14 to the C-terminus of any one of SEQ ID NOs: 10-12, 17-18, 57-296, or 315-321.

20. (canceled)

21. The nucleic acid molecule of claim 1, wherein the nucleic acid molecule is DNA or RNA.

22. The nucleic acid molecule of claim 1, comprising or consisting of:
A DNA sequence at least 80%, at least 90%, or at least 95% identical, or identical, to SEQ ID NO: 13 that encodes a fusion protein set forth as SEQ ID NO: 10, or the complement thereof, or a corresponding RNA sequence or the complement thereof;
a DNA sequence at least 80%, at least 90%, or at least 95% identical, or identical, to SEQ ID NO: 14 that encodes a fusion protein set forth as SEQ ID NO: 11, or the complement thereof, or a corresponding RNA sequence or the complement thereof; or
a DNA sequence at least 80%, at least 90%, or at least 95% identical, or identical, to SEQ ID NO: 15 that encodes a fusion protein set forth as SEQ ID NO: 12, or the complement thereof, or a corresponding RNA sequence or the complement thereof.

23. (canceled)

24. The nucleic acid molecule of claim 1, wherein the nucleic acid molecule is an mRNA or circular RNA with or without modified bases, with or without replication competence.

25. A vector comprising the nucleic acid molecule of claim 1.

26. The vector of claim 25, wherein the vector is a DNA vector, an RNA vector, or a viral vector.

27. A HBsAg protein nanoparticle encoded by the nucleic acid or vector of claim 1.

28. The HBsAg protein nanoparticle of claim 27, comprising SARS-CoV-2 S ectodomain trimers extending radially outward from an outer surface of the nanoparticle.

29. An immunogenic composition comprising the nucleic acid molecule, vector, or HBsAg protein nanoparticle of claim 1 and a pharmaceutically acceptable carrier.

30. The composition of claim 29, wherein the nucleic acid molecule is an mRNA or circular RNA and the composition further comprises a lipid nanoparticle.

31. A method, comprising administering to a subject an amount of the nucleic acid molecule, the vector, HBsAg protein nanoparticle, or the composition of claim 1 in an amount effective to elicit a neutralizing immune response to SARS-CoV-2 in the subject.

32. The method of claim 31, wherein the subject was previously exposed to HBsAg by hepatitis B infection or vaccination.

33. The method of claim 31, wherein the immune response inhibits or prevents SARS-CoV-2 infection, and/or severe COVID19 disease, in the subject.

34. (canceled)
